(19) United States
(12) Patent Application Publication
(10) Pub. No.: US 2022/0256794 A1
(43) Pub. Date: Aug. 18, 2022

(54) TERPENE SYNTHASES AND TRANSPORTERS

(71) Applicant: The State of Israel, Ministry of Agriculture & Rural Development, Agricultural Research Organization, Rishon-LeZion (IL)

(72) Inventors: Shahar COHEN, Rishon-LeZion (IL); Rachel DAVIDOVICH-RIKANATI, Alonei Abba (IL); Einat BAR, Kfar Baruch (IL); Efraim LEWINSOHN, Timrat (IL); Adi DORON-FAIGENBOIM, Ramat-HaSharon (IL); Faris SALAMA, Qalansuwa (IL); Daniel HASSON, Tel Aviv (IL); Shahar SARUBERG, Mahanaim (IL); Yelena YESELSON, Ashdod (IL); Dalia WOLF, Nes Ziona (IL); Guy POLTURAK, Norwich (GB); Maxim ITKIN, Kibbutz HaOgen (IL); Arthur A. SCHAFFER, Hashmonaim (IL)

(73) Assignee: The State of Israel, Ministry of Agriculture & Rural Development, Agricultural Research Organization, Rishon-LeZion (IL)

(21) Appl. No.: 17/609,479

(22) PCT Filed: May 8, 2020
(86) PCT No.: PCT/IL2020/050505

§ 371 Date: Nov. 8, 2021

Related U.S. Application Data
(60) Provisional application No. 62/844,767, filed on May 8, 2019.

(51) Int. Cl. A01H 1/00; C12N 9/88; C12P 5/02; C12P 7/04; C12P 5/00; A01H 5/12; A01H 6/28

(52) U.S. Cl. CPC A01H 1/101; C12N 9/88; C12Y 402/03; A01H 6/28; C12P 7/04; C12P 5/002; A01H 5/12; C12P 5/026

(57) ABSTRACT

A plant comprising a genome having an introgression which comprises a polynucleotide sequence encoding a polypeptide having a terpene synthase activity or a transporter activity, the introgression comprising allelic variation(s) as compared to a genome of a recurrent parent of the plant, is disclosed. Organisms comprising a genome having been genetically modified to express a polypeptide having a terpene synthase activity or a transporter activity are also disclosed. Methods of modulating terpene synthesis or transport of metabolites in organisms, methods of producing plants having a terpene synthase activity of interest, having a terpene profile of interest or having a transporter activity of interest are disclosed. Methods of producing a terpene of interest are also disclosed.

### RELATED APPLICATION/S

[0001] This application claims the benefit of priority of U.S. Provisional Patent Application No. 62/844,767 filed on May 8, 2019, the contents of which are incorporated herein by reference in their entirety.

### SEQUENCE LISTING STATEMENT

[0002] The ASCII file, entitled 82332SequenceListing.txt, created on May 7, 2020, comprising 644,305 bytes, submitted concurrently with the filing of this application is incorporated herein by reference.

### FIELD AND BACKGROUND OF THE INVENTION

[0003] The present invention, in some embodiments thereof, relates to terpene synthases and transporters and, more particularly, but not exclusively, to the expression of terpene synthases and transporters for modulating expression of secondary metabolites in plants of interest.

[0004] Plants produce a large number of secondary metabolites, which are classified into several groups according to their biosynthetic routes and structural features [Yazaki K., Transporters of secondary metabolites. Curr. Opin. Plant Biol. (2005) 8:301-307]. Currently, more than 200,000 secondary metabolites have been identified. Among these compounds, various volatile organic compounds (VOCs) and cannabinoids have recently become subjects of great interest as they tend to encompass valuable pharmaceutical properties. Plant VOCs are chemically diverse and are mainly represented by terpenoids, fatty acid derivatives, benzenoids, and phenylpropanoids.

[0005] Cannabis plants have long been used in drug and industrial applications (e.g. for fiber, seed, seed oils, and medical purposes). Cannabis plants produce cannabinoids, terpenes, and other compounds. Cannabinoids, the most studied group of secondary metabolites in cannabis, are a large family of approximately 150 active compounds that activate cannabinoid receptors in cells and alter neurotransmitter release in the brain.

[0006] Terpenes and terpenoids, a large and diverse class of VOCs, are produced by a variety of plants and are typically associated with odor and flavor. Terpenes of cannabis are classically simple monoterpenes (e.g. D-limonene, β-myrcene, α- and β-pinene, terpinolene and linalool) and sesquiterpenes (e.g. β-caryophyllene and α-humulene) derived from two and three isoprene units, respectively. Terpenoids (isoprenoids) are derived from five-carbon isoprene units. As cannabinoids are odorless, terpenes and terpenoids are responsible for the unique odor of cannabis, and each cannabis variety has a slightly different terpene/terpenoid profile that can be used as a tool for identification of cannabis varieties or geographical origins of samples [Hillig, Biochem System and Ecology (2004) 875-891]. The usefulness of individual mono- and sesquiterpenes in Cannabis has been extensively reviewed [Andre et al. Frontiers in Plant Science (2016) 7:19, and Russo E B, British J Pharmacol. (2011), 163: 1344-1364].

[0007] Cannabis plants produce and accumulate a terpene-rich resin in glandular trichomes, which are most abundant on the surface of female inflorescences. Certain cannabis varieties are rich in terpenes, e.g. in Cannabis sativa L. plants terpenes comprise up to 3-5% of the dry-mass of the female inflorescence. Some terpenes found in Cannabis sativa are relatively well known for their potential in biomedicine and have been used in traditional medicine (e.g. as neuroprotective, antidepressant, anti-inflammatory and anti-cancer agents), while others are yet to be studied in detail (discussed in Tarmo Nuutinen, European Journal of Medicinal Chemistry. (2018) 157:198-228). Moreover, some studies have indicated that terpenes and terpenoids can interact with lipid membranes, with ion channels, with a variety of different receptors (including both G-protein coupled odorant and neurotransmitter receptors) and with enzymes. Thus, terpenes and terpenoids produced by cannabis plants may alter the permeability of cell membranes and allow in either more or less THC, other terpenes and terpenoids can affect serotonin and dopamine chemistry as neurotransmitters, and some terpenes and terpenoids are capable of absorption through human skin and passing the blood brain barrier (U.S. Pat. No. 9,642,317).

[0008] Terpenoids are mainly synthesized in two metabolic pathways: mevalonic acid/MEV pathway (i.e. the mevalonate-dependent pathway, i.e. HMG-CoA reductase pathway) which takes place in the cytosol and has been suggested to be responsible for synthesis of sesquiterpenes (C15), and MEP/DOXP pathway (i.e. the 2-C-methyl-D-erythritol 4-phosphate/1-deoxy-D-xylulose 5-phosphate pathway, non-mevalonate pathway, or mevalonic acid-independent pathway) which takes place in plastids and has been suggested to be responsible for synthesis of hemi-(C5), mono-(C10), and diterpenes-(C20). Terpene synthases (including monoterpene synthases, diterpene synthases, and sesquiterpene synthases) are responsible for synthesis of a large number of terpenes in plants using substrates provided by these two metabolic pathways, in particular, from geranyl diphosphate (GPP), farnesyl diphosphate (FPP), geranylgeranyl diphosphate (GGPP), and any combination of two or more of these. Generally, the terpene synthase gene family of plants is classified into 6 subfamilies, referred to as a, b, c, d, e/f and g. The generalization is that the b subfamily encodes enzymes that catalyze the synthesis of cyclic monoterpenes, the g family of non-cyclic monoterpenes, and the a family catalyzes sesquiterpene synthesis. The additional families comprise diterpene and larger terpene synthases, as well as monocot genes for monoterpene synthases.

[0009] The TPS family of Cannabis has been only partially described and characterized. Recent descriptions of draft genomes and transcriptomes for the hemp-type “Finola” variety and the marijuana-type “Purple Kush” variety have been made publically available [van Bakel H et al., Genome Biology. (2011) 12: p.R102]. Booth et al. [Booth J K et al., PLoS ONE (2017) 12(3): e0173911] carried out a transcriptome analysis of trichomes of the cannabis hemp variety ‘Finola’ revealing sequences of all stages of terpene biosynthesis. Specifically, Booth et al. identified nine cannabis terpene synthases (CsTPS) in subfamilies TPS-a and TPS-b in addition to four TPS genes derived from the Purple Kush genome and transcriptome assembly (van Hakel el al., above). Functional characterization of these 13 putative mono- and sesqui-TPS, indicated products which collectively comprised most of the terpenes of ‘Finola’ resin, including β-myrcene, (E)-β-ocimene, (−)-limonene, (+)-α-pinene, β-caryophyllene, and α-humulene.

[0010] Plants producing secondary metabolites must take great care in their production and storage in order to avoid self-toxicity effects. Plants accomplish this task via numerous detoxification mechanisms in order to eliminate or modify toxic compounds, such as their excretion into extracellular compartments, sequestration into vacuoles, biosynthesis in extracellular compartments and their modification into inactive forms. Secondary metabolites are transported actively within the plant tissue by energy-dependent, molecule-specific transporters, particularly of the ATP-binding Cassette transporter family, referred to as ABC transporters.

[0011] The ABC superfamily of proteins is ubiquitous in all kingdoms of life, composed mainly of primary active transporters, which comprise nucleotide binding domains (NBDs) and transmembrane domains (TMD). While the TMDs bind and translocate substrates across membranes, the NBDs hydrolyze ATP and provide the energy for active transport. The ABC family comprises a large number (more than 120) of putative ABC transporter encoding genes in many plants. Plant ABC transporters are divided, based on protein sequence similarities, into eight distinct subfamilies, named alphabetically from ABCA to ABCH. Among these, the ABCG subfamily is found only in plants and fungi, and consists of two major types of proteins; half-size transporters (ABCG-11/WBC11-white-brown complex), and full-size transporters (earlier known as plant pleiotropic drug-resistant (PDR)-like subfamily). In plants, PDR transporters are reported to be involved in varieties of biological functions, including terpenoids transport. Another subfamily of the ABC transporters is the ABCB subfamily, which include the biologically important multidrug resistant (MDR) protein and the transporter associated with antigen processing (TAP) complex. Current understanding of relations between ABC transporters and their substrate group of secondary metabolites, mainly alkaloids, phenolic compounds, terpenoids and wax, cuticle and suberin-related compounds, has been recently summarized [Shitan N., Bioscience, Biotechnology, and Biochemistry (2016) 80:1283-1293].

[0012] An additional family of transporter proteins is the Peptide Transporter (PTR) family, which consists of 53 nitrate transporter 1/peptide transporter (NPF) (NRT1/PTR FAMILY) members in Arabidopsis. Plant NPF proteins can also transport a large variety of substrates, including dipeptides, nitrate, nitrite, chloride, glucosinolates, and amino-acids, as well as several plant hormones [Corratgé-Faillie C. and Lacombe B., Journal of Experimental Botany (2017) 68:3107-3113].

[0013] Additional background art includes U.S. Patent Application no. 20080281135 relating to methods for producing terpenes of interest in plants having glandular trichomes (e.g. cannabis plants).

### SUMMARY OF THE INVENTION

[0014] According to an aspect of some embodiments of the present invention there is provided a plant comprising a genome having an introgression which comprises a polynucleotide sequence encoding a polypeptide having a terpene synthase activity, the polypeptide comprising an amino acid sequence selected from the group consisting of SEQ ID NO: 1-45, the introgression comprising allelic variation(s) as compared to a genome of a recurrent parent of the plant.

[0015] According to an aspect of some embodiments of the present invention there is provided a method of producing a plant having a terpene synthase activity of interest, the method comprising: (a) crossing a plant which comprises a polynucleotide sequence encoding a polypeptide having a terpene synthase activity, the polypeptide comprising an amino acid sequence selected from the group consisting of SEQ ID NO: 1-45 with a plant of interest, the plant of interest being a recurrent parent; and (b) selecting from a progeny of the crossing a plant having the terpene synthase activity of interest.

[0016] According to an aspect of some embodiments of the present invention there is provided a method of producing a plant having a terpene profile of interest, the method comprising: (a) crossing the plant of some embodiments of the invention, with a plant of interest; and (b) selecting from a progeny of the crossing a plant having the terpene profile of interest.

[0017] According to an aspect of some embodiments of the present invention there is provided an organism comprising a genome having been genetically modified to express a polypeptide having a terpene synthase activity, the polypeptide being at least 95% identical to an amino acid sequence selected from the group consisting of SEQ ID NO: 1-45.

[0018] According to an aspect of some embodiments of the present invention there is provided a method of modulating terpene synthesis in an organism, the method comprising over-expressing within at least one cell of the organism a polypeptide having a terpene synthase activity, the polypeptide being at least 95% identical to an amino acid sequence selected from the group consisting of SEQ ID NO: 1-45, thereby modulating terpene synthesis in the organism.

[0019] According to an aspect of some embodiments of the present invention there is provided an isolated polypeptide comprising an amino acid sequence at least 95% identical to the amino acid sequence selected from the group consisting of SEQ ID NOs: 1-45, wherein the polypeptide, when expressed in an organism, is capable of modulating the synthesis of a terpene of interest.

[0020] According to an aspect of some embodiments of the present invention there is provided a plant comprising a genome having an introgression which comprises a polynucleotide sequence encoding a polypeptide having a transporter activity, the polypeptide comprising an amino acid sequence selected from the group consisting of SEQ ID NO: 46-57, 116, 118, 120, 122, 124, 126, 128 and 130, the introgression comprising allelic variation(s) as compared to a genome of a recurrent parent of the plant.

[0021] According to an aspect of some embodiments of the present invention there is provided a method of producing a plant having a transporter activity of interest, the method comprising: (a) crossing the plant of some embodiments of the invention, with a plant of interest; and (b) selecting from a progeny of the crossing a plant having the transporter activity of interest.

[0022] According to an aspect of some embodiments of the present invention there is provided an organism comprising a genome having been genetically modified to express a polypeptide having a transporter activity, the polypeptide being at least 95% identical to an amino acid sequence selected from the group consisting of SEQ ID NO: 46-57, 116, 118, 120, 122, 124, 126, 128 and 130.

[0023] According to an aspect of some embodiments of the present invention there is provided a method of modulating transport of metabolites in an organism, the method comprising over-expressing within at least one cell of the organism a polypeptide having a transporter activity, the polypeptide being at least 95% identical to an amino acid sequence selected from the group consisting of SEQ ID NO: 46-57, 116, 118, 120, 122, 124, 126, 128 and 130, thereby modulating the transport of the metabolites in the organism.

[0024] According to an aspect of some embodiments of the present invention there is provided an isolated polypeptide comprising an amino acid sequence at least 95% identical to the amino acid sequence selected from the group consisting of SEQ ID NOs: 46-57, 116, 118, 120, 122, 124, 126, 128 and 130, wherein the polypeptide, when expressed in an organism, is capable of modulating transport of metabolites.

[0025] According to an aspect of some embodiments of the present invention there is provided an isolated polynucleotide encoding a polypeptide having a terpene synthase activity, the polypeptide being at least 95% identical to an amino acid sequence selected from the group consisting of SEQ ID NO: 1-45.

[0026] According to an aspect of some embodiments of the present invention there is provided an isolated polynucleotide encoding a polypeptide having a transporter activity, the polypeptide being at least 95% identical to an amino acid sequence selected from the group consisting of SEQ ID NO: 46-57, 116, 118, 120, 122, 124, 126, 128 and 130.

[0027] According to an aspect of some embodiments of the present invention there is provided a nucleic acid construct comprising a nucleic acid sequence of the polynucleotide of some embodiments of the invention, and a cis-acting regulatory element for directing expression of the nucleic acid sequence in a cell.

[0028] According to an aspect of some embodiments of the present invention there is provided an isolated cell comprising at least one exogenous polynucleotide according to of some embodiments of the invention, or construct according to some embodiments of the invention.

[0029] According to an aspect of some embodiments of the present invention there is provided a genetically modified organism comprising at least one exogenous polynucleotide according to some embodiments of the invention, or construct according to some embodiments of the invention.

[0030] According to an aspect of some embodiments of the present invention there is provided a plant generated according to the method of some embodiments of the invention.

[0031] According to an aspect of some embodiments of the present invention there is provided an organism generated according to the method of some embodiments of the invention.

[0032] According to an aspect of some embodiments of the present invention there is provided a method of producing a terpene of interest, the method comprising recovering a terpene fraction comprising the terpene of interest from the plant of some embodiments of the invention, or from the organism of some embodiments of the invention.

[0033] According to an aspect of some embodiments of the present invention there is provided a terpene containing fraction of the plant of some embodiments of the invention, or of the organism of some embodiments of the invention.

[0034] According to an aspect of some embodiments of the present invention there is provided a seed of the plant of some embodiments of the invention.

[0035] According to an aspect of some embodiments of the present invention there is provided a method of producing a plant comprising sowing the seed of some embodiments of the invention or planting a plantlet of the plant of some embodiments of the invention under conditions which allow growth of the plant.

[0036] According to an aspect of some embodiments of the present invention there is provided a pharmaceutical or cosmetic composition obtainable from the plant of some embodiments of the invention, or from the organism of some embodiments of the invention.

[0037] According to an aspect of some embodiments of the present invention there is provided a food or processed product obtainable from the plant of some embodiments of the invention, or from the organism of some embodiments of the invention.

[0038] According to some embodiments of the invention, the allelic variation(s) being in a region spanning not more than 2000 base pairs.

[0039] According to some embodiments of the invention, the plant further comprises a polynucleotide sequence encoding a polypeptide having a transporter activity, the polypeptide comprising an amino acid sequence selected from the group consisting of SEQ ID NO: 46-57, 116, 118, 120, 122, 124, 126, 128 and 130.

[0040] According to some embodiments of the invention, the selecting is effected genotypically.

[0041] According to some embodiments of the invention, the selecting is effected phenotypically.

[0042] According to some embodiments of the invention, the method further comprises backcrossing to the plant of interest.

[0043] According to some embodiments of the invention, the genome further expresses a polypeptide having a transporter activity, the polypeptide being at least 95% identical to an amino acid sequence selected from the group consisting of SEQ ID NO: 46-57, 116, 118, 120, 122, 124, 126, 128 and 130.

[0044] According to some embodiments of the invention, the method comprises introducing into at least one cell of the organism an exogenous polynucleotide encoding the polypeptide.

[0045] According to some embodiments of the invention, the introducing the exogenous polynucleotide into the at least one cell comprises transforming the polynucleotide or a construct comprising same into the at least one cell.

[0046] According to some embodiments of the invention, the introducing the exogenous polynucleotide into the at least one cell comprises subjecting the at least one cell to genome editing using artificially engineered nucleases.

[0047] According to some embodiments of the invention, the plant further comprises a polynucleotide sequence encoding a polypeptide having a terpene synthase activity, the polypeptide comprising an amino acid sequence selected from the group consisting of SEQ ID NO: 1-45.

[0048] According to some embodiments of the invention, the selecting is effected genotypically.

[0049] According to some embodiments of the invention, the selecting is effected phenotypically.

[0050] According to some embodiments of the invention, the method further comprises backcrossing to the plant of interest.

[0051] According to some embodiments of the invention, the genome further expresses a polypeptide having a terpene synthase activity, the polypeptide being at least 95% identical to an amino acid sequence selected from the group consisting of SEQ ID NO: 1-45.

[0052] According to some embodiments of the invention, the transporter comprises an ATP-binding cassette transporter (ABC) or a Peptide Transporter (PTR).

[0053] According to some embodiments of the invention, the metabolites are selected from the group consisting of cannabinoids, terpenoids, alkaloids, phenolic compounds, volatile compounds, peptides, polypeptides, carotenoids, glucosinolates, benzenoids, phenylpropanoids, neurotransmitters, anthocyanins, hormones, flavonoids, organic acids, fatty acids, fatty acids derivatives, wax, cuticle and suberin-related compounds.

[0054] According to some embodiments of the invention, the cis-acting regulatory element comprises a promoter.

[0055] According to some embodiments of the invention, the promoter is plant-expressible promoter.

[0056] According to some embodiments of the invention, the plant-expressible promoter is a trichome-specific promoter.

[0057] According to some embodiments of the invention, the terpene containing fraction of some embodiments of the invention being an extract.

[0058] According to some embodiments of the invention, the terpene containing fraction of some embodiments of the invention being an oil.

[0059] According to some embodiments of the invention, the organism is a non-human organism.

[0060] According to some embodiments of the invention, the non-human organism is selected from the group consisting of a plant, a yeast, a bacteria and an insect.

[0061] According to some embodiments of the invention, the organism is a plant or part thereof.

[0062] According to some embodiments of the invention, the seed of some embodiments of the invention being a hybrid seed.

[0063] According to some embodiments of the invention, the plant is selected from a plant family of Cannabaceae, Asteraceae, Solanaceae and Lamiaceae.

[0064] According to some embodiments of the invention, the plant is a Cannabis plant.

[0065] According to some embodiments of the invention, the plant of interest is a Cannabis plant.

[0066] According to some embodiments of the invention, the plant of interest is a Cannabis sativa plant.

[0067] According to some embodiments of the invention, the part of the plant comprises a glandular trichome or a female inflorescence.

[0068] According to some embodiments of the invention, the terpene of interest or terpene profile of interest comprises at least one monoterpene and/or at least one sesquiterpene.

[0069] According to some embodiments of the invention, the modulating comprises enhancing the expression of the terpene of interest as compared to its expression in a non-genetically modified plant.

[0070] According to some embodiments of the invention, the modulating comprises enhancing the transport of metabolites as compared to transport of metabolites in a non-genetically modified plant

[0071] According to some embodiments of the invention, the pharmaceutical or cosmetic composition of some embodiments of the invention, or food or processed product of some embodiments of the invention, being an oil.

[0072] According to some embodiments of the invention, the pharmaceutical or cosmetic composition of some embodiments of the invention, or food or processed product of some embodiments of the invention, comprising DNA of the plant or of the organism.

[0073] Unless otherwise defined, all technical and/or scientific terms used herein have the same meaning as commonly understood by one of ordinary skill in the art to which the invention pertains. Although methods and materials similar or equivalent to those described herein can be used in the practice or testing of embodiments of the invention, exemplary methods and/or materials are described below. In case of conflict, the patent specification, including definitions, will control. In addition, the materials, methods, and examples are illustrative only and are not intended to be necessarily limiting.

### BRIEF DESCRIPTION OF THE SEVERAL VIEWS OF THE DRAWING(S)

[0074] Some embodiments of the invention are herein described, by way of example only, with reference to the accompanying drawings. With specific reference now to the drawings in detail, it is stressed that the particulars shown are by way of example and for purposes of illustrative discussion of embodiments of the invention. In this regard, the description taken with the drawings makes apparent to those skilled in the art how embodiments of the invention may be practiced.

[0075] In the drawings:

[0076] FIGS. 1A-B are graphs illustrating the effect of transporter AG0100-1 (NRT transporter) on yeast cell growth in the presences or absence of 0.5 mM CBD during a 12 hour incubation. Cell growth was measured as turbidity at A₆₀₀. (FIG. 1A) the effect of CBD on growth of the control empty plasmid yeast, (FIG. 1B) the effect of CBD on growth of the T-AG0100-1 yeast line.

[0077] FIG. 2 is a graph illustrating the effect of different transporter genes on yeast growth in the presence of 0.5 mM CBD. Results are expressed as % growth for each line with CBD, as compared to the growth of each respective line in the absence of CBD. Results are an average and s.d. of five spectrophotometric determinations at hourly intervals between 7 and 12 hours after onset of incubation. Cell growth was measured as turbidity at A₆₀₀.

[0078] FIGS. 3A-B are graphs illustrating effect of ABC transporters on net CBD uptake into yeast cells. (FIG. 3A) CBD content in yeast cells over a three hour period following incubation with 0.5 mM CBD for the ABC transporters T-792-1, T-790-1 and T-AG2575-1 compared to the empty vector. (FIG. 3B) CBD concentration in yeast cells following a 5 hour period for the ABC transporter T-792-1, compared to the empty vector. Results are averages and s.d. of 3 replications.

[0079] FIG. 4 is a graph illustrating the effect of the NRT transporter AG0100-1 on net CBD uptake into yeast cells. Results indicate the amount of CBD present in the yeast cells following a 3 hour uptake. Results are averages and s.d. of 3 replications.

[0080] FIG. 5 is a graph illustrating the effect of the NRT transporter AG0100-1 on net CBD uptake into tobacco BY-2 cells. Results indicate the amount of CBD present in the BY-2 cells throughout a 4 hour uptake. Results are averages and s.d. of 3 replications.

[0081] FIGS. 6A-B are photographs illustrating the effect of the NRT transporter AG0100-1 on CBD-induced cell death of tobacco BY-2 cells. The increased cell death in response to CBD of the BY-2 cells expressing the NRT transporter AG0100-1 is indicated by the sharp decrease in fluorescence. Two micrographs of each treatment are presented. Top of FIG. 6B shows the fluorescence of the control BY2 cells without CBD. Top of FIG. 6A shows a small decrease in the fluorescence of the control BY2 cells in the presence of 0.5 mM CBD. Bottom of FIG. 6B shows the fluorescence of the T-AG0100-1 BY2 cells without CBD, and bottom of FIG. 6A shows the strong decrease in the fluorescence of the T-AG0100-1 BY2 cells in the presence of 0.5 mM CBD.

[0082] FIG. 7 is a graph illustrating the effect of T-790-1 ABC family B transporter on net CBD uptake into tobacco BY-2 cells. Results indicate the amount of CBD present in the BY-2 cells throughout a 5 hour uptake. Results are averages and s.d. of 3 replications.

[0083] FIGS. 8A-C are graphs illustrating the effect of different transporter genes on net uptake of terpenes limonene, caryophyllene and α-pinene into yeast cells. Results indicate the amount (ng compound/mg) of individual terpenes (FIG. 8A) alpha-pinene, (FIG. 8B) limonene and (FIG. 8C) caryophyllene present in the yeast cells following a 2 hour uptake. Values represent the average of two replications and are expressed as percent of the amount of each terpene present in the empty vector yeast.

### DESCRIPTION OF SPECIFIC EMBODIMENTS OF THE INVENTION

[0084] The present invention, in some embodiments thereof, relates to terpene synthases and transporters and, more particularly, but not exclusively, to the expression of terpene synthases and transporters for modulating expression of secondary metabolites in plants of interest.

[0085] Before explaining at least one embodiment of the invention in detail, it is to be understood that the invention is not necessarily limited in its application to the details set forth in the following description or exemplified by the Examples. The invention is capable of other embodiments or of being practiced or carried out in various ways. Also, it is to be understood that the phraseology and terminology employed herein is for the purpose of description and should not be regarded as limiting.

[0086] Cannabis plants produce a large number of secondary metabolites including various volatile organic compounds (VOCs) and cannabinoids. Among these VOCs are terpenoids, fatty acid derivatives, benzenoids, and phenylpropanoids. Terpenes of cannabis are classically simple monoterpenes (e.g. D-limonene, β-myrcene, α- and β-pinene, terpinolene and linalool) and sesquiterpenes (e.g. β-caryophyllene and α-humulene) synthesized by terpene synthases (TPS). In order to avoid self-toxicity effects by the secondary metabolites, plants employ detoxification mechanisms such as their excretion into extracellular compartments, sequestration into vacuoles, biosynthesis in extracellular compartments and their modification into inactive forms. Secondary metabolites are transported actively within the plant tissue by energy-dependent, molecule-specific transporters, particularly of the ATP-binding Cassette transporter family, referred to as ABC transporters. An additional family of transporter proteins is the Peptide Transporter (PTR) family, which transport a large variety of substrates, including dipeptides, nitrate, nitrite, chloride, glucosinolates, and amino-acids, as well as several plant hormones.

[0087] While reducing the present invention to practice, the present inventors have identified full length terpene synthase genes of the a, b and g terpene synthase families in cannabis plants (see Table 1 herein below). These TPS genes were shown to be expressed in the inflorescences of four different varieties of Cannabis sativa, as well as in the enriched trichome fraction of one variety (see Table 1 herein below).

[0088] The present inventors have further identified full length ATP-binding cassette transporter (ABC) and Peptide Transporter (PTR) gene families in cannabis plants (see Table 7, below). These ABC and PTR genes were shown to be expressed in the inflorescences of four different varieties of Cannabis sativa, as well as in the enriched trichome fraction of one variety (see Table 10, herein below).

[0089] The present inventors therefore propose that the newly identified TPS, ABC and PTR genes may be used in breeding of new plant varieties, such as plants comprising higher production of terpenes (i.e. via expression of TPS genes) and/or plants devoid of self-toxicity (i.e. via expression of ABC and PTR genes). The presently identified genes may be further utilized for expression of secondary metabolites (e.g. terpenes) and avoidance of self-toxicity in other organisms (e.g. bacteria, yeast and animals).

[0090] Thus, according to one aspect of the present invention there is provided a plant comprising a genome having an introgression which comprises a polynucleotide sequence encoding a polypeptide having a terpene synthase activity, the polypeptide comprising an amino acid sequence selected from the group consisting of SEQ ID NO: 1-45, the introgression comprising allelic variation(s) in compared to a genome of a recurrent parent of the plant.

[0091] According to another aspect of the present invention there is provided a plant comprising a genome having an introgression which comprises a polynucleotide sequence encoding a polypeptide having a transporter activity, the polypeptide comprising an amino acid sequence selected from the group consisting of SEQ ID NO: 46-57, 116, 118, 120, 122, 124, 126, 128 and 130, the introgression comprising allelic variation(s) in compared to a genome of a recurrent parent of the plant.

[0092] The term “organism” refers to any prokaryotic or eukaryotic organism.

[0093] Prokaryotic organisms include, but are not limited to, bacteria of the species Bacillus, Escherichia (e.g. Escherichia coli), Lactobacillus, Corynebacterium, Acetobacter, Acinetobacter and Pseudomonas.

[0094] Eukaryotic organisms include single- and multi-cellular organisms. Single cell eukaryotic organisms include, but are not limited to, yeast, protozoans, slime molds and algae. Multi-cellular eukaryotic organisms include, but are not limited to, animals (e.g. insects, invertebrates, nematodes, birds, fish, reptiles and crustaceans), plants, fungi and algae (e.g. brown algae, red algae, green algae).

[0095] According to one embodiment, the organism is not a human being.

[0096] Exemplary eukaryotic organisms include, but are not limited to, plants (as discussed below), algae (e.g. of the species Cryptista, Chloromonadophyceae, Xanthophyceae, Crypthecodinium, Chrysophyta, Bacillariophyta, Phaeophyta, Rhodophyta, Chlorophyta, Haptophyta, Cryptista, Euglenozoa, Dinozoa, Chlorarachniophyta), yeast (e.g. of the species Saccharomyces, Kluyveromycesm Candida, Pichia, Cryptococcus, Debaromyces, Hansenula, Saccharomycecopsis, Saccharomycodes, Schizosaccharomyces, Wickerhamia, Debayomyces, Hanseniaspora, Kloeckera, Zygos accharomyces, Ogataea, Kuraishia, Komagataella, Metschnikowia, Williopsis, Nakazawaea, Torulaspora, Bullera, Rhodotorula, Willopsis and Sporobolomyces), fungi (e.g. of the species Aspergillus, Penicillium, Rhizopus, Fusarium, Fusidium, Gibberella, Mucor, Mortierella, Trichoderma) and insects (as discussed below).

[0097] According to a specific embodiment, the organism is an insect.

[0098] The term insect refers to an insect at any stage of development, including an insect nymph and an adult insect. Non-limiting examples of insects include insects selected from the orders Coleoptera, Diptera (e.g. Drosophila), Hymenoptera, Lepidoptera, Mallophaga, Homoptera, Hemiptera, Orthoptera, Thysanoptera, Dermaptera, Isoptera, Anoplura, Siphonaptera, Trichoptera, Drosophilidae, Tephritidae, Pentatomidae, etc., particularly Hemiptera.

[0099] According to a one embodiment, the organism comprises a cell.

[0100] According to a one embodiment, the cell is a bacterial cell, a yeast cell, or a cell of an animal (e.g. insect cell).

[0101] The term “plant” as used herein encompasses whole plants, a grafted plant, ancestors and progeny of the plants and plant parts, including seeds, shoots, stems, roots, rootstock, scion, and plant cells, tissues and organs. The plant may be in any form including suspension cultures, embryos, meristematic regions, callus tissue, leaves, gametophytes, sporophytes, pollen, and microspores.

[0102] According to a specific embodiment, the plant is a plant cell e.g., plant cell in an embryonic cell suspension.

[0103] According to a specific embodiment, the plant comprises a plant or a plant cell generated by the method of some embodiments of the invention.

[0104] According to one embodiment, the part of the plant comprises a glandular trichome or a female inflorescence.

[0105] According to one embodiment, the plant is a wild-type plant.

[0106] According to one embodiment, the plant is non-transgenic.

[0107] According to one embodiment, the plant is transgenic.

[0108] According to one embodiment, the plant is genetically modified (GMO).

[0109] According to one embodiment, the plant is non-genetically modified (non-GMO).

[0110] According to one embodiment, the plant is a Cannabis plant.

[0111] Cannabis is a genus of flowering plants in the family Cannabaceae that includes three different species, Cannabis sativa, Cannabis indica and Cannabis ruderalis. The term Cannabis encompasses wild type Cannabis and also variants thereof, including cannabis chemovars which naturally contain different amounts of the individual cannabinoids. For example, some Cannabis strains have been selectively bred to produce high or low levels of THC and/or CBD and other cannabinoids (as discussed below). Accordingly, Cannabis cultivars that are rich in THC and/or CBD can be used in accordance with the present teachings.

[0112] For example, breeders are developing CBD-rich strains, as reported in Good, Alastair (26 Oct. 2010). “Growing marijuana that won't get you high”. The Daily Telegraph (London). Other CBD-reach strains are available from Tikun Olam that developed a strain of the plant which has only cannabidiol as an active ingredient, and no detectable levels of THC, providing some of the medicinal benefits of cannabis without the psychotrophic effects. Avidekel, a cannabis strain that contains 15.8% CBD and less than 1% THC can also be used according to the present teachings. Alternatively, strains of cannabis containing higher levels of THC than levels of (or no) CBD may be desirable for treating certain medical conditions, such as, for example, conditions causing chronic pain.

[0113] According to one embodiment, the Cannabis plant is a wild-type plant.

[0114] According to one embodiment, the Cannabis plant is non-transgenic.

[0115] According to one embodiment, the Cannabis plant is transgenic.

[0116] According to one embodiment, the Cannabis plant is genomically edited.

[0117] According to one embodiment, the Cannabis plant is Cannabis sativa (C. sativa).

[0118] According to one embodiment, the Cannabis plant is hemp.

[0119] Additional plants that may be useful in the methods of the invention include all plants which belong to the superfamily Viridiplantee, in particular monocotyledonous and dicotyledonous plants including a fodder or forage legume, ornamental plant, food crop, tree, or shrub selected from the list comprising Acacia spp., Acer spp., Actinidia spp., Aesculus spp., Agathis australis, Albizia amara, Alsophila tricolor, Andropogon spp., Arachis spp, Areca catechu, Astelia fragrans, Astragalus cicer, Baikiaea plurijuga, Betula spp., Brassica spp., Bruguiera gymnorrhiza, Burkea africana, Butea frondosa, Cadaba farinosa, Calliandra spp, Camellia sinensis, Cannabaceae, Cannabis indica, Cannabis, Cannabis sativa, Hemp, industrial Hemp, Capsicum spp., Cassia spp., Centroema pubescens, Chacoomeles spp., Cinnamomum cassia, Coffea arabica, Colophospermum mopane, Coronillia varia, Cotoneaster serotina, Crataegus spp., Cucumis spp., Cupressus spp., Cyathea dealbata, Cydonia oblonga, Cryptomeria japonica, Cymbopogon spp., Cynthea dealbata, Cydonia oblonga, Dalbergia monetaria, Davallia divaricata, Desmodium spp., Dicksonia squarosa, Dibeteropogon amplectens, Dioclea spp, Dolichos spp., Dorycnium rectum, Echinochloa pyramidalis, Ehraffia spp., Eleusine coracana, Eragrestis spp., Erythrina spp., Eucalypfus spp., Euclea schimperi, Eulalia vi/losa, Pagopyrum spp., Feijoa sellowlana, Fragaria spp., Flemingia spp, Freycinetia banksli, Geranium thunbergii, GinAgo biloba, Glycine javanica, Gliricidia spp, Gossypium hirsutum, Grevillea spp., Guibourtia coleosperma, Hedysarum spp., Hemaffhia altissima, Heteropogon contoffus, Hordeum vulgare, Hyparhenia rufa, Hypericum erectum, Hypeffhelia dissolute, Indigo incamata, Iris spp., Leptarrhena pyrolifolia, Lespediza spp., Lettuca spp., Leucaena leucocephala, Loudetia simplex, Lotonus bainesli, Lotus spp., Macrotyloma axillare, Malus spp., Manihot esculenta, Medicago sativa, Metasequoia glyptostroboides, Moraceae, Musa sapientum, banana, Nicotianum spp., Onobrychis spp., Ornithopus spp., Oryza spp., Peltophorum africanum, Pennisetum spp., Persea gratissima, Petunia spp., Phaseolus spp., Phoenix canariensis, Phornmium cookianum, Photinia spp., Picea glauca, Pinus spp., Pisum sativam, Podocarpus totara, Pogonarthria fleckii, Pogonaffhria squarrosa, Populus spp., Prosopis cineraria, Pseudotsuga menziesii, Pterolobium stellatum, Pyrus communis, Quercus spp., Rhamnaceae, Rhaphiolepsis umbellata, Rhopalostylis sapida, Rhus natalensis, Ribes grossularia, Ribes spp., Robinia pseudoacacia, Rosa spp., Rubus spp., Salix spp., Schyzachyrium sanguineum, Sciadopitys vefficillata, Sequoia sempervirens, Sequoiadendron giganteum, Sorghum bicolor, Spinacia spp., Sporobolus fimbriatus, Stiburus alopecuroides, Stylosanthos humilis, Tadehagi spp, Taxodium distichum, Themeda triandra, Trifolium spp., Triticum spp., Tsuga heterophylla, Vaccinium spp., Vicia spp., Vitis vinifera, Watsonia pyramidata, Zantedeschia aethiopica, Zea mays, amaranth, artichoke, asparagus, broccoli, Brussels sprouts, cabbage, canola, carrot, cauliflower, celery, collard greens, flax, kale, lentil, oilseed rape, okra, onion, potato, rice, soybean, straw, sugar beet, sugar cane, sunflower, tomato, squash tea, trees. Alternatively algae and other non-Viridiplantae can be used for the methods of some embodiments of the invention.

[0120] According to a specific embodiment, the plant is a Humulus lupulus or a Trema orientalis.

[0121] According to a specific embodiment, the plant belongs to the buckthorn family (Rhamnaceae).

[0122] According to a specific embodiment, the plant is a Ziziphs jujuba.

[0123] According to a specific embodiment, the plant belongs to the family Moraceae.

[0124] According to a specific embodiment, the plant is a Monus notabilis.

[0125] According to a specific embodiment, the plant belongs to the Vitis family.

[0126] According to a specific embodiment, the plant is a Vitis vinmfera.

[0127] According to one embodiment, the plant is a tobacco plant.

[0128] The term “seed” as used herein refers to a flowering plant's unit of reproduction, capable of developing into another such plant.

[0129] According to one embodiment, the seed is a hybrid seed.

[0130] As used herein, the term “hybrid” means any offspring of a cross between two genetically unlike individuals, more preferably the term refers to the cross between two breeding lines which will not reproduce true to the parent from seed.

[0131] As used herein, the term “terpenes” refers to hydrocarbon compounds constructed from one or more five-carbon isoprene units which are combined to produce a diversity of skeletons. The isoprene units are typically connected in a head-to-end manner.

[0132] As used herein, the term “terpenoids”, also commonly referred to as isoprenoids, refer to terpene derivatives or analogs. Typically terpenoids are modified terpenes containing additional functional groups. Terpene derivatives/analogs include, but are not limited to, alcohols, ketones, aldehydes, ethers, acids, hydrocarbons without an oxygen functional group.

[0133] For the sake of being brief, throughout the application, the term “terpenes” is used to also refer to “terpenoids” and vice versa.

[0134] Terpenes and terpenoids comprise many volatile compounds, especially from the monoterpene and sesquiterpene subgroups, however, they may be further modified by conjugation to larger moieties such as sugar residues, which usually renders them non-volatile.

[0135] As used herein, the phrase “terpene profile of interest” refers to the expression of any one or combination of terpenes or terpenoids as discussed herein.

[0136] Determination of a terpene profile of interest may be carried out using any method known in the art, such as by gas chromatograph (GC), thin layer chromatography (TLC), gas chromatography coupled to mass spectrometer (GC-MS), liquid chromatography (LC) and liquid chromatography coupled to mass spectrometer (LC-MS), ion mobility spectrometers (IMS), high-field ion mobility spectrometers asymmetric waveform (FAIMS, high-field asymmetric waveform ion mobility spectrometry) electro-chemical sensors, electrochemical sensor arrays and colorimetric sensors.

[0137] Terpenes and terpenoids are classified according to the number of isoprene units used. The classification thus comprises the following classes: Hemiterpenes and Hemiterpenoids, 1 isoprene unit (5 carbons, i.e. 5C); Monoterpenes and Monoterpenoids, 2 isoprene units (10 carbons, i.e. 10C); Sesquiterpenes and Sesquiterpenoids, 3 isoprene units (15 carbons, i.e. 15C); Diterpenes and Diterpenoids, 4 isoprene units (20 carbons, i.e. 20C) (e.g. ginkgolides); Sesterterpenes, 5 isoprene units (25 carbons, i.e. 25C); Triterpenes and Triterpenoids, 6 isoprene units (30 carbons, i.e. 30C); Tetraterpenes and Tetraterpenoids, 8 isoprene units (40 carbons, i.e. 40C) (e.g. carotenoids) and Polyterpenes with a larger number of isoprene units.

[0138] Hemiterpenoids include, but are not limited to, Isoprene, Prenol and Isovaleric acid.

[0139] Monoterpenoids include, but are not limited to, Geranyl pyrophosphate (also known as geranyl diphosphate, GPP), Cineol, Eucalyptol, Geraniol, Limonene, Linalool, Mycrene, Nerol, Ocimene, Pinene, Terpinene and Thujene.

[0140] Sesquiterpenoids include, but are not limited to, Farnesyl pyrophosphate (FPP), Amorphadiene, Artemisinin, Aromadendrene, Bicyclogermacrene, Bisabolol, Bisabolene, Curcumene, Caryophyllene, Humulene, Farnesene and Selinene.

[0141] Diterpenoids include, but are not limited to, Geranylgeranyl pyrophosphate (GGPP), Retinol, Retinal, Phytol, Taxol, Forskolin and Aphidicolin. Another non-limiting example of a diterpene is ent-kaurene.

[0142] Sesterterpenes include, but are not limited to, Farnesyl geranyl pyrophosphate (FGPP) and Geranylfarnesyl diphosphate (FGPP).

[0143] Triterpenoids include, but are not limited to, Squalene and Lanosterol.

[0144] Tetraterpenoids include, but are not limited to, Lycopene, Carotene and Carotenoids.

[0145] Terpene and terpenoid compounds are biosynthesized from a common C5 precursor, isopentenyl pyrophosphate (IPP). This precursor is typically synthesized via the mevalonate pathway (MEV) or via the non-mevalonate pathway (or 2-C-methyl-D-erythritol 4-phosphate/1-deoxy-D-xylulose 5-phosphate (MEP/DXP) pathway) leading to the formation of IPP and its isomer dimethylallyl pyrophosphate (DMAPP). DMAPP and IPP are then condensed to generate geranyl diphosphate (GPP) which is further converted with IPP into farnesyl diphosphate (FPP). FPP is further condensed with IPP to form geranylgeranyl diphosphate (GGPP). GPP, FPP and GGPP are the precursors of monoterpenes, sesquiterpenes, diterpenes, triterpenes and carotenoids (tetraterpenoids).

[0146] Expression of the above terpene and terpenoid compounds, or combinations thereof, can be used for various purposes such as, without being limited to, enhancement of odor and/or flavor (e.g. in plants or parts thereof, e.g. flowers or fruit, food products, essential oils, cosmetics, and fragrances, as further discussed herein below), as chemotaxonomic markers in plants or parts thereof, and as pheromones in insects. The usefulness of various mono- and sesquiterpenes in Cannabis is discussed in Andre et al. Frontiers in Plant Science (2016) 7:19, and Russo E B, British J Pharmacol. (2011), 163: 1344-1364, both incorporated herein by reference.

[0147] The term “terpene synthase” or “TPS” as used herein refers to an enzyme that catalyzes the production of one or more terpenes or terpenoids from a substrate. A “functional fragment” (also referred to as “biologically active portion”) refers to a portion of a TPS capable of terpene synthesis.

[0148] According to a specific embodiment, TPS catalyzes the production of an isoprenoid compound, such as a monoterpene, sesquiterpene, diterpene, triterpene or carotenoid, from one or several precursors, in particular from geranyl diphosphate (GPP), farnesyl diphosphate (FPP), geranylgeranyl diphosphate (GGPP), and any combination of two or more of these. Generally TPSs are multi-substrate enzymes, capable of synthesizing terpenes of different chain lengths depending on corresponding substrate availability.

[0149] The term “terpene synthase activity” refers to the capability of an enzyme or complex to synthesize an isoprenoid compound (i.e. terpene or terpenoid) as determined in vivo, or in vitro, according to standard techniques (further discussed below).

[0150] Examples of terpene synthases include, without being limited to, monoterpene synthases, sesquiterpene synthases, diterpene synthases, triterpene synthases and hemiterpene synthases.

[0151] The terpene synthase may be a monoterpene synthase including, but not limited to, a geraniol synthase, a myrcene synthase, a linalool synthase (e.g. 3S-linalool synthase, R-linalool synthase), a cineol synthase (e.g. 1,8 cineol synthase), a limonene synthase (e.g. 4S-limonene synthase, R-limonene synthase), a pinene synthase (e.g. (−)-alpha-pinene synthase, (−)-beta-pinene synthase), a fenchol synthase (e.g. (−)-endo-fenchol synthase) and/or a terpineol synthase (e.g. (−)-alpha-terpineol synthase).

[0152] The terpene synthase may be a sesquiterpene synthase including, but not limited to, a farnesyl pyrophosphate synthase (FPPS), a bisabolol synthase (e.g. (+)-epi-alpha-bisabolol synthase), a germacrene synthase (e.g. germacrene A synthase, (E,E)-germacrene B synthase, germacrene C synthase, (−)-germacrene D synthase), a valencene synthase, a nerolidol synthase (e.g. (3S, 6E)-nerolidol synthase), an epi-cedrol synthase, a patchoulol synthase, a santalene synthase and/or delta-cadinene synthase.

[0153] The terpene synthase may be a diterpene synthase including, but not limited to, a geranylgeranyl pyrophosphate synthase (GGPPS) and/or an ent-kaurene synthase.

[0154] The terpene synthase may be a triterpene synthase including, but not limited to, a β-amyrin synthase.

[0155] The terpene synthase may be a hemiterpene synthase including, but not limited to, an isoprene synthase (ISPS).

[0156] The terpene synthase may be a sesterterpene synthase including, but not limited to, a farnesyl geranyl pyrophosphate synthase (FGPPS) or a geranylfarnesyl diphosphate synthase (FGPPS).

[0157] According to one embodiment, the polypeptide comprising the TPS activity comprises one terpene synthase.

[0158] According to one embodiment, the polypeptide comprising the TPS activity may produce 2, 3, 4, 5 or more different terpenes.

[0159] Exemplary polypeptides of the invention comprising TPS activity and exemplary monoterpenes and sesquiterpenes produced by expression of these TPSs (i.e. in an organism or cell) are provided in Table 6 herein below.

[0160] According to a specific embodiment, when the TPS is as set forth in SEQ ID NO: 1 it is capable of producing (Z)-beta-ocimene and/or (E)-beta-ocimene in the presence of GPP.

[0161] According to a specific embodiment, when the TPS is as set forth in SEQ ID NO: 2 it is capable of producing (Z)-beta-ocimene and/or (E)-beta-ocimene in the presence of GPP, and is capable of producing farnesene<(E,E)-alpha> in the presence of FPP.

[0162] According to a specific embodiment, when the TPS is as set forth in SEQ ID NO: 4 it is capable of producing D-limonene, alpha-pinene and/or beta pinene in the presence of GPP.

[0163] According to a specific embodiment, when the TPS is as set forth in SEQ ID NO: 8 it is capable of producing caryophyllene and/or humulene in the presence of FPP.

[0164] According to a specific embodiment, when the TPS is as set forth in SEQ ID NO: 12 it is capable of producing beta-myrcene and/or geraniol in the presence of GPP.

[0165] According to a specific embodiment, when the TPS is as set forth in SEQ ID NO: 17 it is capable of producing selina-3,7(11)-diene in the presence of FPP.

[0166] According to a specific embodiment, when the TPS is as set forth in SEQ ID NO: 18 it is capable of producing geraniol in the presence of GPP, and is capable of producing curcumene, bisabolene and/or bisabolol in the presence of FPP.

[0167] According to a specific embodiment, when the TPS is as set forth in SEQ ID NO: 23 it is capable of producing geraniol in the presence of GPP.

[0168] According to a specific embodiment, when the TPS is as set forth in SEQ ID NO: 31 it is capable of producing beta-myrcene and/or D-limonene/nerol in the presence of GPP, and is capable of producing gamma- and/or delta-selinene in the presence of FPP.

[0169] According to a specific embodiment, when the TPS is as set forth in SEQ ID NO: 33 it is capable of producing myrcene in the presence of GPP.

[0170] According to a specific embodiment, when the TPS is as set forth in SEQ ID NO: 38 it is capable of producing beta-myrcene and/or linalool in the presence of GPP, and is capable of producing caryophyllene 9 epi, aromadendrene and/or bicyclogermacrene in the presence of FPP.

[0171] According to a specific embodiment, when the TPS is as set forth in SEQ ID NO: 40 it is capable of producing beta-myrcene and/or geraniol in the presence of GPP.

[0172] According to a specific embodiment, when the TPS is as set forth in SEQ ID NO: 41 it is capable of producing eucalyptol, gamma terpinene and/or alpha thujene in the presence of GPP.

[0173] According to a specific embodiment, when the TPS is as set forth in SEQ ID NO: 36 it is capable of producing bisabolene in the presence of FPP.

[0174] The term “transporter activity” refers to the activity exerted by a transporter protein or polypeptide on a transporter substrate (molecule and ion), as determined in vivo, or in vitro, according to standard techniques (further discussed below).

[0175] According to one embodiment, a transporter activity comprises the activation of a transport dependent signal transduction pathway.

[0176] According to one embodiment, a transporter activity comprises modulation of the transport of a substrate across a membrane, e.g. cell membrane/wall.

[0177] According to one embodiment, a transporter activity comprises an interaction of a transport protein with a non-transport membrane-associated molecule.

[0178] According to one embodiment, the term “transporter activity of interest” refers to the expression of any one or combination of the transporters discussed herein.

[0179] The term “transporter” or “transporter protein” refers to a polypeptide which has at least one of the above functions. A “functional fragment” (also referred to as “biologically active portion”) refers to a portion of a transporter having at least one of the above functions.

[0180] According to a specific embodiment, the transporter protein actively translocates substrates (molecules and ions) across a membrane, e.g. the cell membrane/wall into the surrounding media.

[0181] Transporters can be grouped into families on the basis of structure, sequence homology and the molecules they transport.

[0182] According to one embodiment, the transporter is an ATP-binding cassette transporter (ABC transporter). ABC transporters are a family of membrane transporters which hydrolyze ATP and use the energy to power the transport of molecules against a concentration gradient through the membrane. ABC transporters regulate the transport of a wide variety of molecules including coating materials, supportive materials, secondary metabolites, and plant hormones. ABC transporters typically comprise one or more transmembrane domains (TMD) connected to one or more ligand binding domains (e.g. nucleotide binding domain, i.e. NBD) on either the intracellular or extracellular side of the lipid bilayer and one or more ATP binding domains on the intracellular surface. Accordingly, ABC transporters bind and use cellular adenosine triphosphate (ATP) for their specific activities. ATP transporters may be classified as half or full transporters. Full transporters may contain two transmembrane domains and two ATP binding domains and are fully functional. Half transporters contain one transdomain and one ATP binding domain and must combine with another half transporter to be fully functional. As such, a plant cell may include all or part of a transporter sufficient to confer functionality.

[0183] Exemplary polypeptides of the invention comprising transporter activity are provided in Table 8 herein below.

[0184] According to a specific embodiment, the ABC transporter is an ABC family B transporter.

[0185] According to a specific embodiment, the ABC transporter is an ABC family G transporter.

[0186] According to one embodiment, the transporter is a transporter associated with antigen processing (TAP) or the multidrug resistance efflux pump (MDR).

[0187] According to one embodiment, the transporter is a small-peptide transporter including the oligopeptide transporter (OPT) family, which can transport tetra- and penta-peptides, and the peptide transporter (PTR) family, which can transport di- and tri-peptides, as discussed in Waterworth and Bray, Annals of Botany (2006) 98: 1-8, incorporated herein by reference.

[0188] According to one embodiment, the transporter is a nitrate transporter 1/peptide transporter (NPF).

[0189] According to a specific embodiment, the transporter is a nitrate transporter (NRT).

[0190] According to one embodiment, the transporter translocates metabolites (e.g. secondary metabolites) thereby avoiding self-toxicity effects.

[0191] According to one embodiment, the metabolites comprise secondary metabolites.

[0192] According to one embodiment, the metabolites comprise cannabinoids, terpenoids, alkaloids, phenolic compounds, volatile compounds, peptides, polypeptides, carotenoids, glucosinolates, benzenoids, phenylpropanoids, neurotransmitters, anthocyanins, hormones, flavonoids, organic acids, fatty acids, fatty acids derivatives, wax, cuticle and suberin-related compounds, herbicides, fungicides, and insecticides.

[0193] According to a specific embodiment, the transporter translocates terpenes and/or cannabinoids.

[0194] Exemplary terpenes are discussed above.

[0195] Exemplary cannabinoids include, but are not limited to the acidic (caroboxylated) forms and non-acidic (decaroboxylated) forms of the following:

[0196] Tetrahydrocannabinol (THC), Cannabidiol (CBD), Cannabigerol (CBG), Cannabichromene (CBC), Cannabinol (CBN), Cannabielsoin (CBE), iso-Tetrahydrocannabimol (iso-THC), Cannabicyclol (CBL), Cannabicitran (CBT), Cannabivarin (CBV), Tetrahydrocannabivarin (THCV), Cannabidivarin (CBDV), Cannabichromevarin (CBCV), Cannabigerovarin (CBGV) and Cannabigerol Monomethyl Ether (CBGM) and derivatives thereof.

[0197] According to one embodiment the cannabinoids include, Alkyl phytocannabinoids, Cannabigerol (CBG)-type compounds, Cannabichromene (CBC)-type compounds, Cannabidiol (CBD)-type compounds, Thymyl-type phytocannabinoids (cannabinodiol- and cannabifuran type compounds), Tetrahydrocannabinol-type compounds, D8-tetrahydrocannabinol (D8-THC)-type compounds, D9-trans-tetrahydrocannabinol (D9-THC)-type compounds, D9-cis-Tetrahydrocannabinol-type compounds, D6a,10a Tetrahydrocannabinol and cannabitriol-type compounds, Isotetrahydrocannabinol-type compounds, Cannabicyclol (CBL)-type compounds, Cannabielsoin (CBE)-type compounds, Cannabinol (CBN)-type compounds, 8,9-Secomenthyl cannabidiols, b-Aralkyl type phytocannabinoids (phytocannabinoidlike compounds, bibenzyl cannabinoids, stiryl cannabinoids), Cannabigerol (CBG) analogues, Cannabichromene (CBC) analogues, Mentyl cannabinoids (CBD, THC) analogues.

[0198] According to one embodiment the cannabinoids include synthetic cannabinoids including, but not limited to:

[0199] Classical cannabinoids (e.g. analogs of THC based on a dibenzopyran ring), e.g. nabilone and dronabinol.

[0200] Non-classical cannabinoids, e g. cyclohexylphenols (CP) e.g. JWH-018

[0201] Aminoalkylindoles, e.g. naphthoylindoles (JWH-018), phenylacetylindoles (JWH-250), and benzoylindoles (AM-2233).

[0202] Eicosanoid synthetic and/or analogs of endocannabinoids, e.g. anandamide (N-arachidonoylethanolamide, AEA) and 2-arachidonoylglycerol (2-AG).

[0203] Natural Eicosanoid (endocannbinoids) e.g. anandamide (N-arachidonoylethanolamide, AEA) and 2-arachidonoylglycerol (2-AG).

[0204] According to one embodiment, the polypeptide comprising the transporter activity comprises one transporter.

[0205] According to one embodiment, the transporter activity comprises transport of 2, 3, 4, 5 or more different substrates.

[0206] As mentioned, the plant comprises a genome having an introgression which comprises a polynucleotide sequence encoding a polypeptide having a terpene synthase activity and/or a transporter activity.

[0207] According to one embodiment, a single plant may comprise a genome having an introgression which comprises two or more polynucleotide sequences encoding two or more polypeptides having a terpene synthase activity and/or a transporter activity.

[0208] According to one embodiment, a single plant may comprise a genome having an introgression which comprises two or more (e.g. 2, 3, 4, 5) polynucleotide sequences encoding two or more (e.g. 2, 3, 4, 5) polypeptides having a terpene synthase activity and/or a transporter activity.

[0209] As used herein, the terms “introgressing”, “introgress” and “introgressed” refer to both a natural and artificial process whereby individual genes or entire chromosomes are moved from one individual, species, variety or cultivar into the genome of another individual, species, variety or cultivar, by crossing those individuals, species, varieties or cultivars. In plant breeding, the process usually involves selfing or backcrossing to the recurrent parent to provide for an increasingly homozygous plant having essentially the characteristics of the recurrent parent in addition to the introgressed gene or trait.

[0210] The term “introgression” refers to the result of an introgression event.

[0211] The term “intercrossable”, as used herein, refers to the ability to yield progeny plants after making crosses between parent plants.

[0212] As used herein, the term “progeny” means genetic descendants or offsprings.

[0213] The terms “variety” and “cultivar” are used interchangeable herein and denote a plant with has deliberately been developed by breeding, e.g. crossing and selection, for the purpose of being commercialized.

[0214] The term “crossing” as used herein refers to the fertilization of female plants (or gametes) by male plants (or gametes). The term “gamete” refers to the haploid reproductive cell (egg or sperm) produced in plants by mitosis from a gametophyte and involved in sexual reproduction, during which two gametes of opposite sex fuse to form a diploid zygote. The term generally includes reference to a pollen (including the sperm cell) and an ovule (including the ovum). “Crossing” therefore generally refers to the fertilization of ovules of one individual with pollen from another individual, whereas “selfing” refers to the fertilization of ovules of an individual with pollen from the same individual. Crossing is widely used in plant breeding and results in a mix of genomic information between the two plants crossed one chromosome from the mother and one chromosome from the father. This will result in a new combination of genetically inherited traits. “Selfing” of a homozygous plant will usually result in a genetic identical plant since there is no genetic variation.

[0215] When referring to “crossing” in the context of achieving the introgression of a genomic region or segment, the skilled person will understand that in order to achieve the introgression of only a part of a chromosome of one plant into the chromosome of another plant, it is required that random portions of the genomes of both parental lines will be recombined during the cross due to the occurrence of crossing-over events in the production of the gametes in the parent lines. Therefore, the genomes of both parents must be combined in a single cell by a cross, where after the production of gametes from the cell and their fusion in fertilization will result in an introgression event.

[0216] The term “backcross” refers to the result of a “backcrossing” process wherein the plant resulting from a cross between two parental lines is (repeatedly) crossed with one of its parental lines, wherein the parental line used in the backcross is referred to as the recurrent parent. Repeated backcrossing results in replacement of genome fragments of the donor parent with those of the recurrent. The offspring of a backcross is designated “BCx” or “BCx population”, where “x” stands for the number of backcrosses.

[0217] The term “backcrossing” as used herein refers to the repeated crossing of a hybrid progeny back to the recurrent parents. The parental plant which contributes the gene for the desired characteristic is termed the non-recurrent or donor parent. This terminology refers to the fact that the donor parent is used one time in the backcross protocol and therefore does not recur. The parental plant to which the gene or genes from the donor parent are transferred is known as the recurrent parent as it is used for several rounds in the backcrossing protocol. In a typical backcross protocol, the original variety of interest (recurrent parent) is crossed to a second variety (donor parent) that carries the single gene of interest to be transferred. The resulting progeny from this cross are then crossed again to the recurrent parent and the process is repeated until a plant is obtained wherein essentially all of the desired morphological and physiological characteristics of the recurrent parent are recovered in the converted plant, in addition to the single gene or a limited number of genes transferred from the donor parent.

[0218] A “line”, as used herein, refers to a population of plants derived from a single cross, backcross or selfing. The individual offspring plants are not necessarily identical to one another. It is possible that individual offspring plants are not vigorous, fertile or self-compatible due to natural variability. However, plants that are vigorous, fertile and self-compatible can be easily identified in a line and used for additional breeding purpose.

[0219] The selection of a suitable recurrent parent is an important step for a successful backcrossing procedure. The goal of a backcross protocol is to alter or substitute a single trait or characteristic in the original variety. To accomplish this, a single gene of the recurrent variety is modified, substituted or supplemented with the desired gene from the donor parent, while retaining essentially all of the rest of the desired genes, and therefore the desired physiological and morphological constitution of the original variety. The choice of the particular donor parent will depend on the purpose of the backcross. One of the major purposes is to add some commercially desirable, agronomically important traits to the recurrent parent (e.g. expression of a terpene synthase gene or a transporter gene). The exact backcrossing protocol will depend on the characteristic or trait being altered or added (e.g. expression of a terpene synthase gene or a transporter gene) to determine an appropriate testing protocol. Although backcrossing methods are simplified when the characteristic being transferred is a dominant allele, a recessive allele may also be transferred. In this instance, it may be necessary to introduce a test of the progeny to determine if the desired characteristic (e.g. expression of a terpene synthase gene or a transporter gene) has been successfully transferred. Preferably, such genes are monitored by molecular markers, as discussed below.

[0220] According to one embodiment, the introgression comprises allelic variation(s) in compared to a genome of a recurrent parent of the plant.

[0221] As used herein, the term “allelic variation” refers to the presence or number of different allele forms at a particular gene locus.

[0222] According to one embodiment, the allelic variation is in a region spanning no more than 1,000,000 base pairs.

[0223] According to one embodiment, the allelic variation is in a region spanning no more than 500,000 base pairs.

[0224] According to one embodiment, the allelic variation is in a region spanning no more than 250,000 base pairs.

[0225] According to one embodiment, the allelic variation is in a region spanning no more than 100,000 base pairs.

[0226] According to one embodiment, the allelic variation is in a region spanning no more than 50,000 base pairs.

[0227] According to one embodiment, the allelic variation is in a region spanning no more than 40,000 base pairs.

[0228] According to one embodiment, the allelic variation is in a region spanning no more than 30,000 base pairs.

[0229] According to one embodiment, the allelic variation is in a region spanning no more than 20,000 base pairs.

[0230] According to one embodiment, the allelic variation is in a region spanning no more than 10,000 base pairs.

[0231] According to one embodiment, the allelic variation is in a region spanning no more than 7500 base pairs.

[0232] According to one embodiment, the allelic variation is in a region spanning no more than 5000 base pairs.

[0233] According to one embodiment, the allelic variation is in a region spanning no more than 4000 base pairs.

[0234] According to one embodiment, the allelic variation is in a region spanning no more than 3000 base pairs.

[0235] According to one embodiment, the allelic variation is in a region spanning no more than 2000 base pairs.

[0236] According to one embodiment, the allelic variation is in a region spanning no more than 1000 base pairs.

[0237] According to one embodiment, the allelic variation is in a region spanning no more than 750 base pairs.

[0238] According to one embodiment, the allelic variation is in a region spanning no more than 500 base pairs.

[0239] According to one embodiment, the allelic variation comprises a polynucleotide sequence encoding a polypeptide comprising an amino acid sequence as set forth in any one of SEQ ID NO: 1-45, or an amino acid sequence which is at least 80%, at least 85%; at least 90%, at least 91%, at least 92%, at least 93%, at least 94%, at least 95%, at least 96%, at least 97%, at least 98%, at least 99% or 100% identical to SEQ ID NO: 1-45 and provided it is not a sequence which is that of the recurrent patent and having a terpene synthase activity.

[0240] According to a specific embodiment, the allelic variation comprises a polynucleotide sequence encoding a polypeptide comprising an amino acid sequence which is 98% identical to SEQ ID NO: 1-45 and provided it is not a sequence which is that of the recurrent patent and having a terpene synthase activity.

[0241] According to a specific embodiment, the allelic variation comprises a polynucleotide sequence encoding a polypeptide comprising an amino acid sequence which is 99% identical to SEQ ID NO: 1-45 and provided it is not a sequence which is that of the recurrent patent and having a terpene synthase activity.

[0242] According to a specific embodiment, the allelic variation comprises a polynucleotide sequence encoding a polypeptide comprising an amino acid sequence which is 100% identical to SEQ ID NO: 1-45 and provided it is not a sequence which is that of the recurrent patent and having a terpene synthase activity.

[0243] According to one embodiment, the allelic variation comprises a polynucleotide sequence comprising a nucleic acid sequence as set forth in any one of SEQ ID NO: 58-102, or a nucleic acid sequence which is at least 80%, at least 85%; at least 90%, at least 91%, at least 92%, at least 93%, at least 94%, at least 95%, at least 96%, at least 97%, at least 98%, at least 99% or 100% identical to SEQ ID NO: 58-102 and provided it is not a sequence which is that of the recurrent patent and having a terpene synthase activity.

[0244] According to one embodiment, the allelic variation comprises a polynucleotide sequence encoding a polypeptide comprising an amino acid sequence as set forth in any one of SEQ ID NO: 46-57, 116, 118, 120, 122, 124, 126, 128 and 130 or an amino acid sequence which is at least 80%, at least 85%; at least 90%, at least 91%, at least 92%, at least 93%, at least 94%, at least 95%, at least 96%, at least 97%, at least 98%, at least 99% or 100% identical to SEQ ID NO: 46-57, 116, 118, 120, 122, 124, 126, 128 and 130, and provided it is not a sequence which is that of the recurrent patent and having a transporter activity.

[0245] According to one embodiment, the allelic variation comprises a polynucleotide sequence encoding a polypeptide comprising an amino acid sequence which is 95% identical to SEQ ID NO: 46-57, 116, 118, 120, 122, 124, 126, 128 and 130, and provided it is not a sequence which is that of the recurrent patent and having a transporter activity.

[0246] According to one embodiment, the allelic variation comprises a polynucleotide sequence encoding a polypeptide comprising an amino acid sequence which is 97% identical to SEQ ID NO: 46-57, 116, 118, 120, 122, 124, 126, 128 and 130, and provided it is not a sequence which is that of the recurrent patent and having a transporter activity.

[0247] According to one embodiment, the allelic variation comprises a polynucleotide sequence encoding a polypeptide comprising an amino acid sequence which is 99% identical to SEQ ID NO: 46-57, 116, 118, 120, 122, 124, 126, 128 and 130, and provided it is not a sequence which is that of the recurrent patent and having a transporter activity.

[0248] According to one embodiment, the allelic variation comprises a polynucleotide sequence encoding a polypeptide comprising an amino acid sequence which is 100% identical to SEQ ID NO: 46-57, 116, 118, 120, 122, 124, 126, 128 and 130, and provided it is not a sequence which is that of the recurrent patent and having a transporter activity.

[0249] According to one embodiment, the allelic variation comprises a polynucleotide sequence comprising a nucleic acid sequence as set forth in any one of SEQ ID NO: 103-115, 117, 119, 121, 123, 125, 127 and 129, or a nucleic acid sequence which is at least 80%, at least 85%; at least 90%, at least 91%, at least 92%, at least 93%, at least 94%, at least 95%, at least 96%, at least 97%, at least 98%, at least 99% or 100% identical to SEQ ID NO: 103-115, 117, 119, 121, 123, 125, 127 and 129, and provided it is not a sequence which is that of the recurrent patent and having a transporter activity.

[0250] According to a specific embodiment, the allelic variation comprises a polynucleotide sequence encoding a polypeptide comprising an amino acid sequence as set forth in any one of SEQ ID NO: 1-57, 116, 118, 120, 122, 124, 126, 128 and 130.

[0251] According to a specific embodiment, the allelic variation comprises a polynucleotide sequence as set forth in any one of SEQ ID NO: 58-115, 117, 119, 121, 123, 125, 127 and 129.

[0252] According to one embodiment, the allelic variation comprises a polynucleotide sequence encoding a polypeptide having a terpene synthase activity (as discussed above) and a polypeptide having a transporter activity (as discussed above).

[0253] According to one embodiment, a plant co-expressing a polypeptide having a terpene synthase activity and a polypeptide having a transporter activity can be obtained by crossing, e.g. taking a plant which has been bred to express (or comprise the introgression) the TPS gene and crossing with a plant that has been bred to express (or comprise the introgression) the transporter gene as described herein.

[0254] According to one embodiment, a plant co-expressing polypeptides having two separate terpene synthase activities can be obtained by crossing, e.g. taking a plant which has been bred to express (or comprise the introgression) the first TPS gene and crossing with a plant that has been bred to express (or comprise the introgression) the second TPS gene as described herein.

[0255] According to one embodiment, a plant co-expressing polypeptides having two separate transporter activities can be obtained by crossing, e.g. taking a plant which has been bred to express (or comprise the introgression) the first transported gene and crossing with a plant that has been bred to express (or comprise the introgression) the second transporter gene as described herein.

[0256] Accordingly, plants may be obtained co-expressing additional polypeptides having a terpene synthase activity and a polypeptide having a transporter activity. Such a determination can be carried out by a person of skill in the art.

[0257] According to another aspect of the invention there is provided an isolated polypeptide comprising an amino acid sequence at least 80%, at least 85%; at least 90%, at least 91%, at least 92%, at least 93%, at least 94%, at least 95%, at least 96%, at least 97%, at least 98%, at least 99% or 100% identical to the amino acid sequence selected from the group consisting of SEQ ID NOs: 1-45, wherein the polypeptide, when expressed in an organism (e.g. non-human organism, e.g. plant or part thereof), is capable of modulating the synthesis of a terpene of interest.

[0258] According to a specific embodiment, the isolated polypeptide comprises an amino acid sequence 98% identical to the amino acid sequence selected from the group consisting of SEQ ID NOs: 1-45, wherein the polypeptide, when expressed in an organism (e.g. non-human organism, e.g. plant or part thereof), is capable of modulating the synthesis of a terpene of interest.

[0259] According to a specific embodiment, the isolated polypeptide comprises an amino acid sequence 99% identical to the amino acid sequence selected from the group consisting of SEQ ID NOs: 1-45, wherein the polypeptide, when expressed in an organism (e.g. non-human organism, e.g. plant or part thereof), is capable of modulating the synthesis of a terpene of interest.

[0260] According to a specific embodiment, the isolated polypeptide comprises an amino acid sequence 100% identical to the amino acid sequence selected from the group consisting of SEQ ID NOs: 1-45, wherein the polypeptide, when expressed in an organism (e.g. non-human organism, e.g. plant or part thereof), is capable of modulating the synthesis of a terpene of interest.

[0261] According to another aspect of the invention there is provided an isolated polypeptide comprising an amino acid sequence at least 80%, at least 85%; at least 90%, at least 91%, at least 92%, at least 93%, at least 94%, at least 95%, at least 96%, at least 97%, at least 98%, at least 99% or 100% identical to the amino acid sequence selected from the group consisting of SEQ ID NOs: 46-57, 116, 118, 120, 122, 124, 126, 128 and 130, wherein the polypeptide, when expressed in an organism (e.g. non-human organism, e.g. plant or part thereof), is capable of modulating transport of metabolites.

[0262] According to a specific embodiment, the isolated polypeptide comprises an amino acid sequence 95% identical to the amino acid sequence selected from the group consisting of SEQ ID NOs: 46-57, 116, 118, 120, 122, 124, 126, 128 and 130, wherein the polypeptide, when expressed in an organism (e.g. non-human organism, e.g. plant or part thereof), is capable of modulating transport of metabolites.

[0263] According to a specific embodiment, the isolated polypeptide comprises an amino acid sequence 97% identical to the amino acid sequence selected from the group consisting of SEQ ID NOs: 46-57, 116, 118, 120, 122, 124, 126, 128 and 130, wherein the polypeptide, when expressed in an organism (e.g. non-human organism, e.g. plant or part thereof), is capable of modulating transport of metabolites.

[0264] According to a specific embodiment, the isolated polypeptide comprises an amino acid sequence 99% identical to the amino acid sequence selected from the group consisting of SEQ ID NOs: 46-57, 116, 118, 120, 122, 124, 126, 128 and 130, wherein the polypeptide, when expressed in an organism (e.g. non-human organism, e.g. plant or part thereof), is capable of modulating transport of metabolites.

[0265] According to a specific embodiment, the isolated polypeptide comprises an amino acid sequence 100% identical to the amino acid sequence selected from the group consisting of SEQ ID NOs: 46-57, 116, 118, 120, 122, 124, 126, 128 and 130, wherein the polypeptide, when expressed in an organism (e.g. non-human organism, e.g. plant or part thereof), is capable of modulating transport of metabolites.

[0266] The term “isolated” refers to at least partially separated from the natural environment e.g., from an organism e.g. from a whole plant.

[0267] As used herein, the terms “polypeptide” or “heterologous polypeptide” refer to a polypeptide produced by recombinant DNA techniques, i.e., produced from cells transformed by an exogenous nucleic acid (e.g. nucleic acid construct) encoding the polypeptide. The polypeptide can be foreign to the cell or a homologous polypeptide derived from a nucleic acid sequence not from its natural location and expression level in the genome of the cell.

[0268] Homology (e.g., percent homology, sequence identity+sequence similarity) can be determined using any homology comparison software computing a pairwise sequence alignment.

[0269] As used herein, “sequence identity” or “identity” in the context of two nucleic acid or polypeptide sequences includes reference to the residues in the two sequences which are the same when aligned. When percentage of sequence identity is used in reference to proteins it is recognized that residue positions which are not identical often differ by conservative amino acid substitutions, where amino acid residues are substituted for other amino acid residues with similar chemical properties (e.g. charge or hydrophobicity) and therefore do not change the functional properties of the molecule. Where sequences differ in conservative substitutions, the percent sequence identity may be adjusted upwards to correct for the conservative nature of the substitution. Sequences which differ by such conservative substitutions are considered to have “sequence similarity” or “similarity”. Means for making this adjustment are well-known to those of skill in the art. Typically this involves scoring a conservative substitution as a partial rather than a full mismatch, thereby increasing the percentage sequence identity. Thus, for example, where an identical amino acid is given a score of 1 and a non-conservative substitution is given a score of zero, a conservative substitution is given a score between zero and 1. The scoring of conservative substitutions is calculated, e.g., according to the algorithm of Henikoff S and Henikoff JG. [Amino acid substitution matrices from protein blocks. Proc. Natl. Acad. Sci. U.S.A. 1992, 89(22): 10915-9].

[0270] Identity (e.g., percent homology) can be determined using any homology comparison software, including for example, the BlastN software of the National Center of Biotechnology Information (NCBI) such as by using default parameters.

[0271] According to some embodiments of the invention, the identity is a global identity, i.e., an identity over the entire amino acid or nucleic acid sequences of the invention and not over portions thereof.

[0272] According to some embodiments of the invention, the term “homology” or “homologous” refers to identity of two or more nucleic acid sequences; or identity of two or more amino acid sequences; or the identity of an amino acid sequence to one or more nucleic acid sequence.

[0273] According to some embodiments of the invention, the homology is a global homology, i.e., a homology over the entire amino acid or nucleic acid sequences of the invention and not over portions thereof.

[0274] The degree of homology or identity between two or more sequences can be determined using various known sequence comparison tools. Following is a non-limiting description of such tools which can be used along with some embodiments of the invention.

[0275] When starting with a polynucleotide sequence and comparing to other polynucleotide sequences the EMBOSS-6.0.1 Needleman-Wunsch algorithm (available from emboss(dot)sourceforge(dot)net/apps/cvs/emboss/apps/needle(dot)html) can be used with the following default parameters: (EMBOSS-6.0.1) gapopen=10; gapextend=0.5: datafile=EDNAFULL; brief=YES.

[0276] According to some embodiments of the invention, the parameters used with the EMBOSS-6.0.1 Needleman-Wunsch algorithm are gapopen=10; gapextend=0.2; datafile=EDNAFULL; brief=YES.

[0277] According to some embodiments of the invention, the threshold used to determine homology using the EMBOSS-6.0.1 Needleman-Wunsch algorithm for comparison of polynucleotides with polynucleotides is 80%, 81%, 82%, 83%, 84%, 85%, 86%, 87%, 88%, 89%, 90%, 91%, 92%, 93%, 94%, 95%, 96%, 97%, 98%, 99%, or 100%.

[0278] According to some embodiment, determination of the degree of homology further requires employing the Smith-Waterman algorithm (for protein-protein comparison or nucleotide-nucleotide comparison).

[0279] Default parameters for GenCore 6.0 Smith-Waterman algorithm include: model=sw.model.

[0280] According to some embodiments of the invention, the threshold used to determine homology using the Smith-Waterman algorithm is 80%, 81%, 82%, 83%, 84%, 85%, 86%, 87%, 88%, 89%, 90%, 91%, 92%, 93%, 94%, 95%, 96%, 97%, 98%, 99%, or 100%.

[0281] According to some embodiments of the invention, the global homology is performed on sequences which are pre-selected by local homology to the polypeptide or polynucleotide of interest (e.g., 60% identity over 60% of the sequence length), prior to performing the global homology to the polypeptide or polynucleotide of interest (e.g., 80% global homology on the entire sequence). For example, homologous sequences are selected using the BLAST software with the Blastp and tBlastn algorithms as filters for the first stage, and the needle (EMBOSS package) or Frame+ algorithm alignment for the second stage. Local identity (Blast alignments) is defined with a very permissive cutoff −60% Identity on a span of 60% of the sequences lengths because it is used only as a filter for the global alignment stage. In this specific embodiment (when the local identity is used), the default filtering of the Blast package is not utilized (by setting the parameter “−FF”).

[0282] In the second stage, homologs are defined based on a global identity of at least 80% to the core gene polypeptide sequence. According to some embodiments the homology is a local homology or a local identity.

[0283] Local alignments tools include, but are not limited to the BlastP, BlastN, BlastX or TBLASTN software of the National Center of Biotechnology Information (NCBI), FASTA, and the Smith-Waterman algorithm.

[0284] According to a specific embodiment, homology is determined using BlastN version 2.7.1+ with the following default parameters: task=blastn, evalue=10, strand=both, gap opening penalty=5, gap extension penalty=2, match=1, mismatch=−1, word size=11, max scores=25, max alignments=15, query filter=dust, query gentetic code—n/a, matrix=no default.

[0285] According to one embodiment, there is provided an isolated polynucleotide encoding the polypeptide of some embodiments of the invention.

[0286] According to one embodiment, the polynucleotide comprises the nucleic acid sequence as set forth in SEQ ID NO: 58-115, 117, 119, 121, 123, 125, 127 and 129.

[0287] According to another aspect of the invention there is provided an organism comprising a genome having been genetically modified to express a polypeptide having a terpene synthase activity, the polypeptide being at least 80%, at least 85%; at least 90%, at least 91%, at least 92%, at least 93%, at least 94%, at least 95%, at least 96%, at least 97%, at least 98%, at least 99% or 100% identical to an amino acid sequence selected from the group consisting of SEQ ID NO: 1-45.

[0288] According to a specific embodiment there is provided an organism comprising a genome having been genetically modified to express a polypeptide having a terpene synthase activity, the polypeptide being 98%, 99% or 100% identical to an amino acid sequence selected from the group consisting of SEQ ID NO: 1-45.

[0289] According to another aspect of the invention there is provided a cell comprising a genome having been genetically modified to express a polypeptide having a terpene synthase activity, the polypeptide being at least 80%, at least 85%; at least 90%, at least 91%, at least 92%, at least 93%, at least 94%, at least 95%, at least 96%, at least 97%, at least 98%, at least 99% or 100% identical to an amino acid sequence selected from the group consisting of SEQ ID NO: 1-45.

[0290] According to a specific embodiment there is provided a cell comprising a genome having been genetically modified to express a polypeptide having a terpene synthase activity, the polypeptide being 98%, 99% or 100% identical to an amino acid sequence selected from the group consisting of SEQ ID NO: 1-45.

[0291] According to another aspect of the invention there is provided a plant comprising a genome having been genetically modified to express a polypeptide having a terpene synthase activity, the polypeptide being at least 80%, at least 85%; at least 90%, at least 91%, at least 92%, at least 93%, at least 94%, at least 95%, at least 96%, at least 97%, at least 98%, at least 99% or 100% identical to an amino acid sequence selected from the group consisting of SEQ ID NO: 1-45.

[0292] According to a specific embodiment there is provided a plant comprising a genome having been genetically modified to express a polypeptide having a terpene synthase activity, the polypeptide being 98%, 99% or 100% identical to an amino acid sequence selected from the group consisting of SEQ ID NO: 1-45.

[0293] According to another aspect of the invention there is provided a method of modulating terpene synthesis in an organism, the method comprising over-expressing within at least one cell of the organism a polypeptide having a terpene synthase activity, the polypeptide being at least 80%, at least 85%; at least 90%, at least 91%, at least 92%, at least 93%, at least 94%, at least 95%, at least 96%, at least 97%, at least 98%, at least 99% or 100% identical to an amino acid sequence selected from the group consisting of SEQ ID NO: 1-45, thereby modulating terpene synthesis in the organism.

[0294] According to a specific embodiment there is provided a method of modulating terpene synthesis in an organism, the method comprising over-expressing within at least one cell of the organism a polypeptide having a terpene synthase activity, the polypeptide being 98%, 99% or 100% identical to an amino acid sequence selected from the group consisting of SEQ ID NO: 1-45, thereby modulating terpene synthesis in the organism.

[0295] According to another aspect of the invention there is provided a method of modulating terpene synthesis in a cell of interest, the method comprising over-expressing within at least one cell of interest a polypeptide having a terpene synthase activity, the polypeptide being at least 80%, at least 85%; at least 90%, at least 91%, at least 92%, at least 93%, at least 94%, at least 95%, at least 96%, at least 97%, at least 98%, at least 99% or 100% identical to an amino acid sequence selected from the group consisting of SEQ ID NO: 1-45, thereby modulating terpene synthesis in the cell of interest.

[0296] According to a specific embodiment there is provided a method of modulating terpene synthesis in a cell of interest, the method comprising over-expressing within at least one cell of interest a polypeptide having a terpene synthase activity, the polypeptide being 98%, 99% or 100% identical to an amino acid sequence selected from the group consisting of SEQ ID NO: 1-45, thereby modulating terpene synthesis in the cell of interest.

[0297] According to another aspect of the invention there is provided a method of modulating terpene synthesis in a plant, the method comprising over-expressing within the plant or part thereof a polypeptide having a terpene synthase activity, the polypeptide being at least 80%, at least 85%; at least 90%, at least 91%, at least 92%, at least 93%, at least 94%, at least 95%, at least 96%, at least 97%, at least 98%, at least 99% or 100% identical to an amino acid sequence selected from the group consisting of SEQ ID NO: 1-45, thereby modulating terpene synthesis in the plant.

[0298] According to a specific embodiment there is provided a method of modulating terpene synthesis in a plant, the method comprising over-expressing within the plant or part thereof a polypeptide having a terpene synthase activity, the polypeptide being 98%, 99% or 100% identical to an amino acid sequence selected from the group consisting of SEQ ID NO: 1-45, thereby modulating terpene synthesis in the plant.

[0299] According to a specific embodiment, the amino acid sequence is at least 85% identical to SEQ ID NO: 1-45.

[0300] According to a specific embodiment, the amino acid sequence is at least 90% identical to SEQ ID NO: 1-45.

[0301] According to a specific embodiment, the amino acid sequence is at least 95% identical to SEQ ID NO: 1-45.

[0302] According to a specific embodiment, the amino acid sequence is at least 97% identical to SEQ ID NO: 1-45.

[0303] According to a specific embodiment, the amino acid sequence is at least 98% identical to SEQ ID NO: 1-45.

[0304] According to a specific embodiment, the amino acid sequence is at least 99% identical to SEQ ID NO: 1-45.

[0305] According to a specific embodiment, the amino acid sequence is as set forth in SEQ ID NO: 1-45.

[0306] According to a specific embodiment, the amino acid sequence has a terpene synthase activity.

[0307] According to one embodiment, the polypeptide sequence is encoded by a nucleic acid sequence as set forth in any one of SEQ ID NO: 58-102 or a nucleic acid sequence which is at least 80%, at least 85%; at least 90%, at least 91%, at least 92%, at least 93%, at least 94%, at least 95%, at least 96%, at least 97%, at least 98%, at least 99% or 100% identical to SEQ ID NO: 58-102.

[0308] According to another aspect of the invention there is provided an organism comprising a genome having been genetically modified to express a polypeptide having a transporter activity, the polypeptide being at least 80%, at least 85%; at least 90%, at least 91%, at least 92%, at least 93%, at least 94%, at least 95%, at least 96%, at least 97%, at least 98%, at least 99% or 100% identical to an amino acid sequence selected from the group consisting of SEQ ID NO: 46-57, 116, 118, 120, 122, 124, 126, 128 and 130.

[0309] According to a specific embodiment there is provided an organism comprising a genome having been genetically modified to express a polypeptide having a transporter activity, the polypeptide being 95%, 96%, 97%, 98%, 99% or 100% identical to an amino acid sequence selected from the group consisting of SEQ ID NO: 46-57, 116, 118, 120, 122, 124, 126, 128 and 130.

[0310] According to another aspect of the invention there is provided a cell comprising a genome having been genetically modified to express a polypeptide having a transporter activity, the polypeptide being at least 80%, at least 85%; at least 90%, at least 91%, at least 92%, at least 93%, at least 94%, at least 95%, at least 96%, at least 97%, at least 98%, at least 99% or 100% identical to an amino acid sequence selected from the group consisting of SEQ ID NO: 46-57, 116, 118, 120, 122, 124, 126, 128 and 130.

[0311] According to a specific embodiment there is provided a cell comprising a genome having been genetically modified to express a polypeptide having a transporter activity, the polypeptide being 95%, 96%, 97%, 98%, 99% or 100% identical to an amino acid sequence selected from the group consisting of SEQ ID NO: 46-57, 116, 118, 120, 122, 124, 126, 128 and 130.

[0312] According to another aspect of the invention there is provided a plant comprising a genome having been genetically modified to express a polypeptide having a transporter activity, the polypeptide being at least 80%, at least 85%; at least 90%, at least 91%, at least 92%, at least 93%, at least 94%, at least 95%, at least 96%, at least 97%, at least 98%, at least 99% or 100% identical to an amino acid sequence selected from the group consisting of SEQ ID NO: 46-57, 116, 118, 120, 122, 124, 126, 128 and 130.

[0313] According to a specific embodiment there is provided a plant comprising a genome having been genetically modified to express a polypeptide having a transporter activity, the polypeptide being 95%, 96%, 97%, 98%, 99% or 100% identical to an amino acid sequence selected from the group consisting of SEQ ID NO: 46-57, 116, 118, 120, 122, 124, 126, 128 and 130.

[0314] According to another aspect of the invention there is provided a method of modulating transport of metabolites in an organism, the method comprising over-expressing within at least one cell of the organism a polypeptide having a transporter activity, the polypeptide being at least 80%, at least 85%; at least 90%, at least 91%, at least 92%, at least 93%, at least 94%, at least 95%, at least 96%, at least 97%, at least 98%, at least 99% or 100% identical to an amino acid sequence selected from the group consisting of SEQ ID NO: 46-57, 116, 118, 120, 122, 124, 126, 128 and 130, thereby modulating the transport of the metabolites in the organism.

[0315] According to a specific embodiment there is provided a method of modulating transport of metabolites in an organism, the method comprising over-expressing within at least one cell of the organism a polypeptide having a transporter activity, the polypeptide being 95%, 96%, 97%, 98%, 99% or 100% identical to an amino acid sequence selected from the group consisting of SEQ ID NO: 46-57, 116, 118, 120, 122, 124, 126, 128 and 130, thereby modulating the transport of the metabolites in the organism.

[0316] According to another aspect of the invention there is provided a method of modulating transport of metabolites in a cell of interest, the method comprising over-expressing within at least one cell of the organism a polypeptide having a transporter activity, the polypeptide being at least 80%, at least 85%; at least 90%, at least 91%, at least 92%, at least 93%, at least 94%, at least 95%, at least 96%, at least 97%, at least 98%, at least 99% or 100% identical to an amino acid sequence selected from the group consisting of SEQ ID NO: 46-57, 116, 118, 120, 122, 124, 126, 128 and 130, thereby modulating transport of metabolites in the cell of interest.

[0317] According to a specific embodiment there is provided a method of modulating transport of metabolites in a cell of interest, the method comprising over-expressing within at least one cell of the organism a polypeptide having a transporter activity, the polypeptide being 95%, 96%, 97%, 98%, 99% or 100% identical to an amino acid sequence selected from the group consisting of SEQ ID NO: 46-57, 116, 118, 120, 122, 124, 126, 128 and 130, thereby modulating transport of metabolites in the cell of interest.

[0318] According to another aspect of the invention there is provided a method of modulating transport of metabolites in a plant, the method comprising over-expressing within the plant or part thereof a polypeptide having a transporter activity, the polypeptide being at least 80%, at least 85%; at least 90%, at least 91%, at least 92%, at least 93%, at least 94%, at least 95%, at least 96%, at least 97%, at least 98%, at least 99% or 100% identical to an amino acid sequence selected from the group consisting of SEQ ID NO: 46-57, 116, 118, 120, 122, 124, 126, 128 and 130, thereby modulating the transport of the metabolites in the plant.

[0319] According to a specific embodiment there is provided a method of modulating transport of metabolites in a plant, the method comprising over-expressing within the plant or part thereof a polypeptide having a transporter activity, the polypeptide being 95%, 96%, 97%, 98%, 99% or 100% identical to an amino acid sequence selected from the group consisting of SEQ ID NO: 46-57, 116, 118, 120, 122, 124, 126, 128 and 130, thereby modulating the transport of the metabolites in the plant.

[0320] According to a specific embodiment, the amino acid sequence is at least 85% identical to SEQ ID NO: 46-57, 116, 118, 120, 122, 124, 126, 128 and 130.

[0321] According to a specific embodiment, the amino acid sequence is at least 90% identical to SEQ ID NO: 46-57, 116, 118, 120, 122, 124, 126, 128 and 130.

[0322] According to a specific embodiment, the amino acid sequence is at least 95% identical to SEQ ID NO: 46-57, 116, 118, 120, 122, 124, 126, 128 and 130.

[0323] According to a specific embodiment, the amino acid sequence is at least 96% identical to SEQ ID NO: 46-57, 116, 118, 120, 122, 124, 126, 128 and 130.

[0324] According to a specific embodiment, the amino acid sequence is at least 97% identical to SEQ ID NO: 46-57, 116, 118, 120, 122, 124, 126, 128 and 130.

[0325] According to a specific embodiment, the amino acid sequence is at least 98% identical to SEQ ID NO: 46-57, 116, 118, 120, 122, 124, 126, 128 and 130.

[0326] According to a specific embodiment, the amino acid sequence is at least 99% identical to SEQ ID NO: 46-57, 116, 118, 120, 122, 124, 126, 128 and 130.

[0327] According to a specific embodiment, the amino acid sequence is as set forth in SEQ ID NO: 46-57, 116, 118, 120, 122, 124, 126, 128 and 130.

[0328] According to a specific embodiment, the amino acid sequence has a transporter activity.

[0329] According to one embodiment, the polypeptide sequence is encoded by a nucleic acid sequence as set forth in any one of SEQ ID NO: 103-115, 117, 119, 121, 123, 125, 127 and 129, or a nucleic acid sequence which is at least 80%, at least 85%; at least 90%, at least 91%, at least 92%, at least 93%, at least 94%, at least 95%, at least 96%, at least 97%, at least 98%, at least 99% or 100% identical to SEQ ID NO: 103-115, 117, 119, 121, 123, 125, 127 and 129.

[0330] As used herein, the term “genetically modified” refers to an organism e.g. non-human organism, e.g. plant (e.g. cannabis plant) comprising an exogenous nucleic acid sequence. The organism (e.g. plant) may be transgenic or non-transgenic (i.e., wherein a cell of the organism, e.g. plant, does not comprise foreign regulatory elements such as viral components, e.g., exogenous promoter).

[0331] The term “over-expressing” refers to an expression of a polypeptide at least about 10%, at least about 20%, at least about 30%, at least about 40%, at least about 50%, at least about 60%, at least about 70%, at least about 80%, at least about 90%, at least about 95% or about 100% higher as compared to a non-modified organism e.g. plant (e.g. recurrent plant).

[0332] According to one embodiment, modulating comprises enhancing the expression of the terpene of interest by at least about 10%, at least about 20%, at least about 30%, at least about 40%, at least about 50%, at least about 60%, at least about 70%, at least about 80%, at least about 90%, at least about 95% or about 100% as compared to its expression in a non-genetically modified organism e.g. plant (e.g. recurrent plant).

[0333] According to one embodiment, modulating comprises enhancing the transport of metabolites by at least about 10%, at least about 20%, at least about 30%, at least about 40%, at least about 50%, at least about 60%, at least about 70%, at least about 80%, at least about 90%, at least about 95% or about 100% as compared to transport of metabolites in a non-genetically modified organism e.g. plant (e.g. recurrent plant).

[0334] Such enhanced transport enables less self-toxicity in a cell e.g. plant cell, which ultimately leads to higher production of metabolites (e.g. secondary metabolites including terpenes and cannabinoids in plant cells). Such metabolites may be recovered from the organism e.g. plant as described hereinbelow.

[0335] According to one embodiment of the invention, the method comprises co-expressing within the organism (e.g. non-human organism, e.g. plant or part thereof, bacteria, yeast, insect, etc.) a polypeptide having a terpene synthase activity and a polypeptide having a transporter activity. Such co-expression can be effected concomitantly or at separate times (e.g. within minutes, hours, days, weeks or months of each other).

[0336] According to one embodiment, the method comprises co-expressing within the organism (e.g. non-human organism, e.g. plant or part thereof, bacteria, yeast, insect, etc.) polypeptides having two separate terpene synthase activities. Such co-expression can be effected concomitantly or at separate times (e.g. within minutes, hours, days, weeks or months of each other).

[0337] According to one embodiment, the method comprises co-expressing within the organism (e.g. non-human organism, e.g. plant or part thereof, bacteria, yeast, insect, etc.) polypeptides having two separate transporter activities. Such co-expression can be effected concomitantly or at separate times (e.g. within minutes, hours, days, weeks or months of each other).

[0338] According to one embodiment, the method comprises introducing into at least one cell of the organism (e.g. non-human organism, e.g. plant or part thereof, bacteria, yeast, insect, etc.) an exogenous polynucleotide encoding the polypeptide.

[0339] Transgenes can be introduced into the organism (e.g. non-human organism, e.g. plant, bacteria, yeast, insect, etc.) using any of an assortment of established recombinant methods well-known to persons skilled in the art.

[0340] According to one embodiment, methods of genetic transformation are utilized wherein the gene is isolated from the chromosome of a donor variety (e.g. donor plant variety), or wherein a synthetic gene is produced, and wherein the isolated or synthetic gene is then introduced into the recipient (e.g. recipient plant) by genetic transformation techniques.

[0341] According to one embodiment, a nucleic acid (e.g. DNA) sequence comprising one or more of the genes as defined herein and in Tables 1 and 7 below may be used for the production of an organism (e.g. non-human organism, e.g. plant, bacteria, yeast, insect, etc.) having an additional agronomically desirable trait (e.g. expression of a terpene synthase gene or a transporter gene).

[0342] For transgenic methods of transfer a nucleic acid sequence comprising a desirable gene for an agronomically desirable trait (e.g. expression of a terpene synthase gene or a transporter gene) may be isolated from a donor organism e.g. plant by using methods known in the art (or may be synthetically produced) and the isolated nucleic acid sequence may be transferred to the recipient organism e.g. plant by transgenic methods for transformation (e.g. plant transformation), for instance by means of a vector, in a gamete, or in any other suitable transfer element, such as a bombardment with a particle coated with the nucleic acid sequence, as further discussed below. Plant transformation generally involves the construction of a vector with an expression cassette that will function in plant cells.

[0343] According to one embodiment, introducing the exogenous polynucleotide into the at least one cell comprises transforming the polynucleotide or a construct comprising same into the at least one cell.

[0344] Constructs useful in the methods according to some embodiments of the invention may be constructed using recombinant DNA technology well known to persons skilled in the art. The gene constructs may be inserted into vectors, which may be commercially available, suitable for transforming into plants and suitable for expression of the gene of interest in the transformed cells. The genetic construct can be an expression vector wherein the nucleic acid sequence is operably linked to one or more regulatory sequences allowing expression in the plant cells.

[0345] According to one embodiment, the regulatory sequence is a cis-acting regulatory element for directing expression of the nucleic acid sequence in a cell e.g. plant cell.

[0346] In a particular embodiment of some embodiments of the invention the regulatory sequence (e.g. sequence of the cis-acting regulatory element) is a plant-expressible promoter.

[0347] As used herein the phrase “plant-expressible” refers to a promoter sequence, including any additional regulatory elements added thereto or contained therein, is at least capable of inducing, conferring, activating or enhancing expression in a plant cell, tissue or organ, preferably a monocotyledonous or dicotyledonous plant cell, tissue, or organ. Suitable promoters which may be used in accordance with the present teachings include constitutive promoters, seed preferred promoters, flower specific promoters, as discussed in U.S. Patent Application Nos. 20180371484 and 20160348125, incorporated herein by reference in their entirety.

[0348] According to a specific embodiment, the promoter is a trichome-specific promoter, see a labdane diterpene Z-abienol in tobacco glandular trichomes (Sallaud C. el al., Plant J. (2013) 72:1-17), a cembratrien-ol synthase gene in Nicotiana sylvestris (Ennajdaoui H. et al., Plant Mol. Biol. (2010) 73: 673-685) and a BAHD acetyltransferase in tomato trichomes. (Schilmiller A. L. et al. Proc. Natl. Acad. Si. USA. (2012) 109:16377-16382).

[0349] Nucleic acid sequences of the polypeptides of some embodiments of the invention may be optimized for expression in a specific organism e.g. plant expression. Examples of such sequence modifications include, but are not limited to, an altered G/C content to more closely approach that typically found in the plant species of interest, and the removal of codons atypically found in the plant species commonly referred to as codon optimization. Codon optimization tables are provided on-line e.g. at the Codon Usage Database through the NIAS (National Institute of Agrobiological Sciences) DNA bank in Japan (www(dot)kazusa(dot)or(dot)jp/codon/). The Codon Usage Database contains codon usage tables for a number of different species, with each codon usage table having been statistically determined based on the data present in Genbank.

[0350] Thus, some embodiments of the invention encompasses nucleic acid sequences described hereinabove; fragments thereof, sequences hybridizable therewith, sequences homologous thereto, sequences orthologous thereto, sequences encoding similar polypeptides with different codon usage, altered sequences characterized by mutations, such as deletion, insertion or substitution of one or more nucleotides, either naturally occurring or man induced, either randomly or in a targeted fashion.

[0351] Cells, e.g. plant cells, may be transformed stably or transiently with the nucleic acid constructs of some embodiments of the invention. In stable transformation, the nucleic acid molecule of some embodiments of the invention is integrated into the genome, e.g. plant genome, and as such it represents a stable and inherited trait. In transient transformation, the nucleic acid molecule is expressed by the cell transformed but it is not integrated into the genome and as such it represents a transient trait.

[0352] There are various methods of introducing foreign genes into both monocotyledonous and dicotyledonous plants (Potrykus, I., Annu. Rev. Plant. Physiol., Plant. Mol. Biol. (1991) 42:205-225; Shimamoto et al., Nature (1989) 338:274-276) including Agrobacterium-mediated gene transfer and direct DNA uptake (e.g. electroporation, microinjection, microparticle bombardment) as discussed in U.S. Patent Application Nos. 20180371484 and 20160348125, both incorporated herein by reference in their entirety.

[0353] Although stable transformation is presently preferred, transient transformation of cells e.g. leaf cells, meristematic cells or the whole plant, is also envisaged by some embodiments of the invention.

[0354] Transient transformation can be effected by any of the direct DNA transfer methods described above or by viral infection using modified viruses (e.g. plant viruses).

[0355] Viruses that have been shown to be useful for the transformation of plant hosts include CaMV, TMV and BV. Transformation of plants using plant viruses is described in U.S. Pat. No. 4,855,237 (BGV), EP-A 67,553 (TMV), Japanese Published Application No. 63-14693 (TMV), EPA 194,809 (BV), EPA 278,667 (BV); and Gluzman, Y. et al., Communications in Molecular Biology. Viral Vectors, Cold Spring Harbor Laboratory, New York, pp. 172-189 (1988). Pseudovirus particles for use in expressing foreign DNA in many hosts, including plants, is described in WO 87/06261.

[0356] Construction of RNA viruses for the introduction and expression of non-viral exogenous nucleic acid sequences in plants is demonstrated by the above references as well as by Dawson, W. O. et al., Virology (1989) 172:285-292; Takamatsu et al. EMBO J. (1987) 6:307-311; French et al. Science (1986) 231:1294-1297; and Takamatsu et al. FEBS Letters (1990) 269:73-76.

[0357] In addition to the above, the nucleic acid molecule of some embodiments of the invention can also be introduced into a chloroplast genome thereby enabling chloroplast expression.

[0358] A technique for introducing exogenous nucleic acid sequences to the genome of the chloroplasts is known. Further details relating to this technique are found in U.S. Pat. Nos. 4,945,050; and 5,693,507 which are incorporated herein by reference.

[0359] According to one embodiment, the expression vectors can include at least one marker gene that allows transformed cells containing the marker to be either recovered by negative selection (by inhibiting the growth of cells that do not contain the selectable marker gene), or by positive selection (by screening for the product encoded by the marker gene). Many commonly used selectable marker genes for transformation are known in the art, and include, for example, genes that code for enzymes that metabolically detoxify a selective chemical agent which may be an antibiotic or a herbicide, or genes that encode an altered target which is insensitive to an inhibitor.

[0360] According to one embodiment, the marker is a toxic selection marker. An exemplary toxic selection marker that can be used as a marker is, without being limited to, allyl alcohol selection using the Alcohol dehydrogenase (ADH1) gene. ADH1, comprising a group of dehydrogenase enzymes which catalyse the interconversion between alcohols and aldehydes or ketones with the concomitant reduction of NAD+ or NADP+, breaks down alcoholic toxic substances within tissues. For example, plants harboring reduced ADH1 expression exhibit increase tolerance to allyl alcohol. Accordingly, plants with reduced ADH1 are resistant to the toxic effect of allyl alcohol.

[0361] Additionally or alternatively, a fluorescent protein can be used which emits fluorescence and is typically detectable by flow cytometry, microscopy or any fluorescent imaging system, therefore can be used as a basis for selection of cells expressing such a protein.

[0362] Examples of fluorescent proteins that can be used as markers are, without being limited to, the Green Fluorescent Protein (GFP), the Blue Fluorescent Protein (BFP) and the red fluorescent proteins (e.g. dsRed, mCherry, RFP). A non-limiting list of fluorescent or other markers includes proteins detectable by luminescence (e.g. luciferase) or colorimetric assay (e.g. GUS). A review of new classes of fluorescent proteins and applications can be found in Trends in Biochemical Sciences [Rodriguez, Erik A.; Campbell, Robert E.; Lin, John Y.; Lin, Michael Z.; Miyawaki, Atsushi; Palmer, Amy E.; Shu. Xiaokun; Zhang, Jin; Tsien, Roger Y. “The Growing and Glowing Toolbox of Fluorescent and Photoactive Proteins”. Trends in Biochemical Sciences. doi:10.1016j.tibs.2016.09.010].

[0363] Alternatively, marker-less transformation can be used to obtain organisms e.g. plants without mentioned marker genes, the techniques for which are known in the art.

[0364] According to one embodiment, introducing the exogenous polynucleotide into the at least one cell comprises subjecting the at least one cell to genome editing using artificially engineered nucleases.

[0365] Various exemplary methods may be used to introduce nucleic acid alterations to a gene of interest and various agents may be used for implementing same according to specific embodiments of the present invention.

[0366] For example, genome editing may be carried out using engineered endonucleases. These include the meganucleases, Zinc finger nucleases (ZFNs), transcription-activator like effector nucleases (TALENs) and CRISPR/Cas system. Such methods are discussed in detail in U.S. Patent Application No. 20190085038 and in PCT publication no. WO 2019058253, both incorporated herein by reference in their entirety. Additional methods which may be used include e.g. the “Hit and run” or “in-out” method, “double-replacement” or “tag and exchange” strategy, Site-Specific Recombinases, and Transposase systems, as discussed in U.S. Patent Application No. 20190085038, incorporated herein by reference in its entirety.

[0367] Methods for qualifying efficacy and detecting sequence alteration are well known in the art and include, but not limited to, DNA sequencing, electrophoresis, an enzyme-based mismatch detection assay and a hybridization assay such as PCR, RT-PCR, RNase protection, in-situ hybridization, primer extension, Southern blot, Northern Blot and dot blot analysis.

[0368] Sequence alterations in a specific gene can also be determined at the protein level using e.g. chromatography, electrophoretic methods, immunodetection assays such as ELISA and western blot analysis and immunohistochemistry.

[0369] According to one embodiment, there is provided a method of producing a plant having a terpene synthase activity of interest, the method comprising: (a) crossing a plant which comprises a polynucleotide sequence encoding a polypeptide having a terpene synthase activity, the polypeptide comprising an amino acid sequence selected from the group consisting of SEQ ID NO: 1-45 with a plant of interest, the plant of interest being a recurrent parent; and (b) selecting from a progeny of the crossing a plant having the terpene synthase activity of interest.

[0370] According to one embodiment, there is provided a method of producing a plant having a terpene profile of interest, the method comprising: (a) crossing the plant of some embodiments of the invention, with a plant of interest; and (b) selecting from a progeny of the crossing a plant having the terpene profile of interest.

[0371] According to one embodiment, there is provided a method of producing a plant having a transporter activity of interest, the method comprising: (a) crossing the plant of some embodiments of the invention, with a plant of interest; and (b) selecting from a progeny of the crossing a plant having the transporter activity of interest.

[0372] According to one embodiment, the method comprises selecting for progeny of the crossing a plant having the terpene synthase activity of interest and the transporter activity of interest.

[0373] According to one embodiment, the method comprises selecting for progeny of the crossing a plant having the terpene profile of interest and the transporter activity of interest.

[0374] According to one embodiment, the method further comprises backcrossing to the plant of interest (e.g. recurrent plant).

[0375] According to one embodiment, selection of a plant (or other organism e.g. non-human organism) comprising an introgression is effected genotypically, e.g. by presence or expression of a gene or lack of presence or expression (e.g. marker assisted breeding).

[0376] According to one embodiment, selection of progeny plant (or other organism e.g. non-human organism) having the desired characteristics is performed by analyzing cells (e.g. plant cells) for a marker, e.g. molecular genetic marker, i.e. an indicator that is used in methods for visualizing differences in nucleic acid sequences. Examples of such indicators are restriction fragment length polymorphism (RFLP) markers, amplified fragment length polymorphism (AFLP) markers, single nucleotide polymorphisms (SNPs), insertion/deletion (INDEL) mutations, microsatellite markers (SSRs), sequence-characterized amplified regions (SCARs), cleaved amplified polymorphic sequence (CAPS) markers or isozyme markers or combinations of the markers described herein which defines a specific genetic and chromosomal location.

[0377] Methods for detecting sequence alteration are well known in the art and include, but are not limited to, DNA and RNA sequencing (e.g., next generation sequencing), electrophoresis, an enzyme-based mismatch detection assay and a hybridization assay such as PCR, RT-PCR, RNase protection, in-situ hybridization, primer extension, Southern blot, Northern Blot and dot blot analysis. Various methods used for detection of single nucleotide polymorphisms (SNPs) can also be used, such as PCR based T7 endonuclease, Heteroduplex and Sanger sequencing, or PCR followed by restriction digest to detect appearance or disappearance of unique restriction site/s.

[0378] According to one embodiment, selection of a plant comprising an introgression is effected phenotypically.

[0379] According to one embodiment, selection of plant (or other organism e.g. non-human organism) having a terpene profile is effected using any method known in the art, e.g. by gas chromatograph (GC), thin layer chromatography (TLC), gas chromatography coupled to mass spectrometer (GC-MS), liquid chromatography (LC), ion mobility spectrometers (IMS), high-field ion mobility spectrometers asymmetric waveform (FAIMS, high-field asymmetric waveform ion mobility spectrometry) electro-chemical sensors, electrochemical sensor arrays and colorimetric sensors.

[0380] An exemplary method for assessing a terpene profile includes the following steps: (1) breaking one or more cell (e.g. plant cell) to release its chemical constituents; (2) extracting the sample using a suitable solvent (or through distillation or the trapping of compounds); (3) separating the desired terpene from other undesired contents of the extracts that confound analysis and quantification; and (4) using appropriate method of analysis (e.g. TLC, GC, or LC), as discussed in detail in Jiang et al., Curr Protoc Plant Biol. (2016) 1: 345-358.

[0381] According to one embodiment, selection of plant (or other organism e.g. non-human organism) having a transporter activity is effected using any method known in the art, e.g. using assays designed to measure transporter function, for example, ATP hydrolysis, conformational change, or solute transport, such as biophysical methods with different fluorescent dyes (as discussed in detail in Bartosiewicza and Krasowskab, Zeitschrift fur Naturforschung 2009) or positron emission tomography (PET) imaging of the plant.

[0382] According to one embodiment, a phenotype is determined prior to a genotype.

[0383] According to one embodiment, a genotype is determined prior to a phenotype.

[0384] Regardless of the method of introduction, the present teachings provide for an isolated cell (e.g., plant cell or bacterial cell) which comprises an exogenous nucleic acid sequence encoding the polypeptide of some embodiments of the invention.

[0385] According to one embodiment, the present teachings provide for an isolated cell (e.g., plant cell or bacterial cell) or organism (e.g. non-human organism, e.g. plant or part thereof, bacteria, yeast, insect, etc.) co-expressing a polypeptide having a terpene synthase activity and a polypeptide having a transporter activity.

[0386] According to one embodiment, the present teachings provide for an isolated cell (e.g., plant cell or bacterial cell) or organism (e.g. non-human organism, e.g. plant or part thereof, bacteria, yeast, insect, etc.) co-expressing polypeptides having two separate terpene synthase activities.

[0387] According to one embodiment, the present teachings provide for an isolated cell (e.g., plant cell or bacterial cell) or organism (e.g. non-human organism, e.g. plant or part thereof, bacteria, yeast, insect, etc.) co-expressing polypeptides having two separate transporter activities.

[0388] The present invention further provides methods of producing a plant comprising sowing the seed of some embodiments of the invention or planting a plantlet of the plant of some embodiments of the invention under conditions which allow growth of the plant.

[0389] The present invention further provides methods of producing a terpene of interest, the method comprising recovering a terpene fraction comprising the terpene of interest from the organism (e.g. non-human organism e.g. plant, yeast, bacteria, insect, etc.) of some embodiments of the invention.

[0390] According to one embodiment, the terpene is extracted as oil (e.g. essential oil).

[0391] The term “oil” refers to a mixture of compounds obtained from the extraction of cannabis plants. Such compounds include, but are not limited to, cannabinoids, terpenes, terpenoids, and other compounds found in the plant. The exact composition of oil will depend on the plant (e.g. strain of cannabis) that is used for extraction, the efficiency and process of the extraction itself, and any additives that might be incorporated to alter the palatability or improve administration of the oil.

[0392] The term oil includes derivatives thereof, including racemic mixtures, enantiomers, diastereomers, hydrates, salts, solvates, metabolites, analogs, and homologs. Composition, production and plant families of oils comprising terpenes (e.g. essential oils), are described in detail in Kirk-Othmer Encyclopedia of Chemical Technology, 4^{th} Edition S. Price, Aromatherapy Workbook—Understanding Essential Oils from Plant to Bottle, (HarperCollins Publishers, 1993; J. Rose, The Aromatherapy Book—Applications & Inhalations (North Atlantic Books, 1992); and in The Merck Index, 13^{th} Edition, each of which is incorporated herein by reference.

[0393] According to one embodiment, the terpene comprising oil is extracted (harvested, recovered, etc.) from a plant (e.g. trichome-bearing plant) using any of several known suitable methods, including but not limited to steam distillation, organic extraction, and microwave techniques. The various chemical components of the oil may be isolated through traditional organic extraction and purification methods. Further, the plant and its essential oil may be subjected to qualitative and quantitative analysis using any method known in the art. The composition and quality of the oil may be determined using, for example, gas chromatography/mass spectroscopy (GC/MS).

[0394] For example, leaves can be directly (without prior freezing) steam-distilled and solvent-extracted using, for example, pentane in a condenser-cooled Likens-Nickerson apparatus (as discussed in Ringer et al., 2003). Terpenes and other components can then be identified by comparison of retention times and mass spectra to those of authentic standards in gas chromatography with mass spectrometry detection. Quantification can be achieved by gas chromatography with flame ionization detection based upon calibration curves with known amounts of authentic standards and normalization to the peak area of camphor as internal standard.

[0395] Methods for extraction of oil from cannabis plants are well known in the art, and include for example, CO₂ extraction, alcohol (e.g., ethanol) extraction, and oil extraction, as discussed in PCT publication no. WO 2016123475, incorporated herein by reference in its entirety.

[0396] Methods of extraction of terpenes are well known in the art, and include for example, solvent extraction with organic solvents, solid phase microextraction (SPME), headspace method involving the concentration of compounds by condensation or by the application of solid phase resins/columns.

[0397] Any composition obtainable from the organism (e.g. non-human organism e.g. plant, bacteria, yeast, insect, etc.) of some embodiments of the invention (e.g. oil comprising secondary metabolites including terpenes, terpenoids and cannabinoids) can be used in pharmaceutical, cosmetic, cleaning or recreational compositions.

[0398] As used herein a “pharmaceutical composition” or “cosmetic composition” refers to a preparation of one or more of the active ingredients described herein with other chemical components such as physiologically suitable carriers and excipients. The purpose of a pharmaceutical composition is to facilitate administration of a compound to an organism.

[0399] Herein the term “active ingredient” refers to the composition obtainable from the organism (e.g. non-human organism, e.g. plant, bacteria, yeast, insect, etc.) accountable for the biological effect.

[0400] Hereinafter, the phrases “physiologically acceptable carrier” and “pharmaceutically acceptable carrier” which may be interchangeably used refer to a carrier or a diluent that does not cause significant irritation to an organism and does not abrogate the biological activity and properties of the administered compound. An adjuvant is included under these phrases.

[0401] Herein the term “excipient” refers to an inert substance added to a pharmaceutical composition to further facilitate administration of an active ingredient. Examples, without limitation, of excipients include calcium carbonate, calcium phosphate, various sugars and types of starch, cellulose derivatives, gelatin, vegetable oils and polyethylene glycols.

[0402] Techniques for formulation and administration of drugs may be found in “Remington's Pharmaceutical Sciences,” Mack Publishing Co., Easton, Pa., latest edition, which is incorporated herein by reference.

[0403] Suitable routes of administration may, for example, include oral, rectal, transmucosal, especially transnasal, intestinal or parenteral delivery, including intramuscular, subcutaneous and intramedullary injections as well as intrathecal, direct intraventricular, intracardiac, e.g., into the right or left ventricular cavity, into the common coronary artery, intravenous, intraperitoneal, intranasal, or intraocular injections.

[0404] Conventional approaches for drug delivery to the central nervous system (CNS) include: neurosurgical strategies (e.g., intracerebral injection or intracerebroventricular infusion), molecular manipulation of the agent (e.g., production of a chimeric fusion protein that comprises a transport peptide that has an affinity for an endothelial cell surface molecule in combination with an agent that is itself incapable of crossing the BBB) in an attempt to exploit one of the endogenous transport pathways of the BBB; pharmacological strategies designed to increase the lipid solubility of an agent (e.g., conjugation of water-soluble agents to lipid or cholesterol carriers); and the transitory disruption of the integrity of the BBB by hyperosmotic disruption (resulting from the infusion of a mannitol solution into the carotid artery or the use of a biologically active agent such as an angiotensin peptide). However, each of these strategies has limitations, such as the inherent risks associated with an invasive surgical procedure, a size limitation imposed by a limitation inherent in the endogenous transport systems, potentially undesirable biological side effects associated with the systemic administration of a chimeric molecule comprised of a carrier motif that could be active outside of the CNS, and the possible risk of brain damage within regions of the brain where the BBB is disrupted, which renders it a suboptimal delivery method.

[0405] Alternately, one may administer the pharmaceutical composition in a local rather than systemic manner, for example, via injection of the pharmaceutical composition directly into a tissue region of a patient.

[0406] Pharmaceutical compositions of some embodiments of the invention may be manufactured by processes well known in the art, e.g., by means of conventional mixing, dissolving, granulating, dragee-making, levigating, emulsifying, encapsulating, entrapping or lyophilizing processes.

[0407] Pharmaceutical compositions for use in accordance with some embodiments of the invention thus may be formulated in conventional manner using one or more physiologically acceptable carriers comprising excipients and auxiliaries, which facilitate processing of the active ingredients into preparations which, can be used pharmaceutically. Proper formulation is dependent upon the route of administration chosen.

[0408] For injection, the active ingredients of the pharmaceutical composition may be formulated in aqueous solutions, preferably in physiologically compatible buffers such as Hank's solution, Ringer's solution, or physiological salt buffer. For transmucosal administration, penetrants appropriate to the barrier to be permeated are used in the formulation. Such penetrants are generally known in the art.

[0409] For oral administration, the pharmaceutical composition can be formulated readily by combining the active compounds with pharmaceutically acceptable carriers well known in the art. Such carriers enable the pharmaceutical composition to be formulated as tablets, pills, dragees, capsules, liquids, gels, syrups, slurries, suspensions, and the like, for oral ingestion by a patient. Pharmacological preparations for oral use can be made using a solid excipient, optionally grinding the resulting mixture, and processing the mixture of granules, after adding suitable auxiliaries if desired, to obtain tablets or dragee cores. Suitable excipients are, in particular, fillers such as sugars, including lactose, sucrose, mannitol, or sorbitol; cellulose preparations such as, for example, maize starch, wheat starch, rice starch, potato starch, gelatin, gum tragacanth, methyl cellulose, hydroxypropylmethyl-cellulose, sodium carbomethylcellulose; and/or physiologically acceptable polymers such as polyvinylpyrrolidone (PVP). If desired, disintegrating agents may be added, such as cross-linked polyvinyl pyrrolidone, agar, or alginic acid or a salt thereof such as sodium alginate.

[0410] Dragee cores are provided with suitable coatings. For this purpose, concentrated sugar solutions may be used which may optionally contain gum arabic, talc, polyvinyl pyrrolidone, carbopol gel, polyethylene glycol, titanium dioxide, lacquer solutions and suitable organic solvents or solvent mixtures. Dyestuffs or pigments may be added to the tablets or dragee coatings for identification or to characterize different combinations of active compound doses.

[0411] Pharmaceutical compositions which can be used orally, include push-fit capsules made of gelatin as well as soft, sealed capsules made of gelatin and a plasticizer, such as glycerol or sorbitol. The push-fit capsules may contain the active ingredients in admixture with filler such as lactose, binders such as starches, lubricants such as talc or magnesium stearate and, optionally, stabilizers. In soft capsules, the active ingredients may be dissolved or suspended in suitable liquids, such as fatty oils, liquid paraffin, or liquid polyethylene glycols. In addition, stabilizers may be added. All formulations for oral administration should be in dosages suitable for the chosen route of administration.

[0412] For buccal administration, the compositions may take the form of tablets or lozenges formulated in conventional manner.

[0413] For administration by nasal inhalation, the active ingredients for use according to some embodiments of the invention are conveniently delivered in the form of an aerosol spray presentation from a pressurized pack or a nebulizer with the use of a suitable propellant, e.g., dichlorodifluoromethane, trichlorofluoromethane, dichloro-tetrafluoroethane or carbon dioxide. In the case of a pressurized aerosol, the dosage unit may be determined by providing a valve to deliver a metered amount. Capsules and cartridges of, e.g., gelatin for use in a dispenser may be formulated containing a powder mix of the compound and a suitable powder base such as lactose or starch.

[0414] The pharmaceutical composition described herein may be formulated for parenteral administration, e.g., by bolus injection or continuous infusion. Formulations for injection may be presented in unit dosage form, e.g., in ampoules or in multidose containers with optionally, an added preservative. The compositions may be suspensions, solutions or emulsions in oily or aqueous vehicles, and may contain formulatory agents such as suspending, stabilizing and/or dispersing agents.

[0415] Pharmaceutical compositions for parenteral administration include aqueous solutions of the active preparation in water-soluble form. Additionally, suspensions of the active ingredients may be prepared as appropriate oily or water based injection suspensions. Suitable lipophilic solvents or vehicles include fatty oils such as sesame oil, or synthetic fatty acids esters such as ethyl oleate, triglycerides or liposomes. Aqueous injection suspensions may contain substances, which increase the viscosity of the suspension, such as sodium carboxymethyl cellulose, sorbitol or dextran. Optionally, the suspension may also contain suitable stabilizers or agents which increase the solubility of the active ingredients to allow for the preparation of highly concentrated solutions.

[0416] Alternatively, the active ingredient may be in powder form for constitution with a suitable vehicle, e.g., sterile, pyrogen-free water based solution, before use.

[0417] The pharmaceutical composition of some embodiments of the invention may also be formulated in rectal compositions such as suppositories or retention enemas, using, e.g., conventional suppository bases such as cocoa butter or other glycerides.

[0418] Pharmaceutical compositions suitable for use in context of some embodiments of the invention include compositions wherein the active ingredients are contained in an amount effective to achieve the intended purpose. More specifically, a therapeutically effective amount means an amount of active ingredients (e.g. a terpene comprising composition) effective to prevent, alleviate or ameliorate symptoms of a disorder or prolong the survival of the subject being treated.

[0419] Determination of a therapeutically effective amount is well within the capability of those skilled in the art, especially in light of the detailed disclosure provided herein.

[0420] For any preparation used in the methods of the invention, the therapeutically effective amount or dose can be estimated initially from in vitro and cell culture assays. For example, a dose can be formulated in animal models to achieve a desired concentration or titer. Such information can be used to more accurately determine useful doses in humans.

[0421] According to one embodiment, a therapeutically effective amount of a composition comprising liquid chromatography pooled fractions of a plant (e.g. cannabis plant) comprising active ingredients (cannabinoids, terpenes and/or terpenoids).

[0422] Toxicity and therapeutic efficacy of the active ingredients described herein can be determined by standard pharmaceutical procedures in vitro, in cell cultures or experimental animals. The data obtained from these in vitro and cell culture assays and animal studies can be used in formulating a range of dosage for use in human. The dosage may vary depending upon the dosage form employed and the route of administration utilized. The exact formulation, route of administration and dosage can be chosen by the individual physician in view of the patient's condition. (See e.g., Fingl, et al., 1975, in “The Pharmacological Basis of Therapeutics”, Ch. 1 p. 1).

[0423] Dosage amount and interval may be adjusted individually to provide appropriate levels of the active ingredient sufficient to induce or suppress the biological effect (minimal effective concentration, MEC). The MEC will vary for each preparation, but can be estimated from in vitro data. Dosages necessary to achieve the MEC will depend on individual characteristics and route of administration. Detection assays can be used to determine plasma concentrations.

[0424] Depending on the severity and responsiveness of the condition to be treated, dosing can be of a single or a plurality of administrations, with course of treatment lasting from several days to several weeks or until cure is effected or diminution of the disease state is achieved.

[0425] The amount of a composition to be administered will, of course, be dependent on the subject being treated, the severity of the affliction, the manner of administration, the judgment of the prescribing physician, etc.

[0426] Compositions of some embodiments of the invention may, if desired, be presented in a pack or dispenser device, such as an FDA approved kit, which may contain one or more unit dosage forms containing the active ingredient. The pack may, for example, comprise metal or plastic foil, such as a blister pack. The pack or dispenser device may be accompanied by instructions for administration. The pack or dispenser may also be accommodated by a notice associated with the container in a form prescribed by a governmental agency regulating the manufacture, use or sale of pharmaceuticals, which notice is reflective of approval by the agency of the form of the compositions or human or veterinary administration. Such notice, for example, may be of labeling approved by the U.S. Food and Drug Administration for prescription drugs or of an approved product insert. Compositions comprising a preparation of the invention formulated in a compatible pharmaceutical carrier may also be prepared, placed in an appropriate container, and labeled for treatment of an indicated condition, as is further detailed above.

[0427] According to one embodiment, and without being limited to, the pharmaceutical composition may be used for the treatment of pain, inflammation, depression, anxiety, addiction, eating disorder, epilepsy, cancer, and infections (e.g.viral, fungal and bacterial infections).

[0428] The preparations made from the organism (e.g. non-human organism, e.g. plants or parts thereof, bacteria, yeast, insect, etc.) of the present invention (e.g. oil comprising secondary metabolites including terpenes, terpenoids and cannabinoids) can be administered to a subject (e.g., a human or animal) in need thereof in a variety of other forms including a nutraceutical composition.

[0429] As used herein, a “nutraceutical composition” refers to any substance that may be considered a food or part of a food and provides medical or health benefits, including the prevention and treatment of disease, or ease of disease symptoms. In some embodiments, a nutraceutical composition is intended to supplement the diet (i.e. dietary supplements) and contains at least one or more of the following ingredients: a vitamin; a mineral; an herb; a botanical; a fruit; a vegetable; an amino acid; or a concentrate, metabolite, constituent, or extract of any of the previously mentioned ingredients; and combinations thereof.

[0430] In some embodiments, a nutraceutical composition of the present invention can be administered as a “dietary supplement,” as defined by the U.S. Food and Drug Administration, which is a product taken by mouth that contains a “dietary ingredient” such as, but not limited to, a vitamin, a mineral, an herb or other botanical, an amino acid, and substances such as an enzyme, an organ tissue, a glandular, a metabolite, or an extract or concentrate thereof.

[0431] Non-limiting forms of nutraceutical compositions of the present invention include: a tablet, a capsule, a pill, a softgel, a gelcap, a liquid, a powder, a solution, a tincture, a suspension, a syrup, an oil, or other forms known to persons of skill in the art. A nutraceutical composition can also be in the form of a food, such as, but not limited to, a food bar, a beverage, a food gel, a food additive/supplement, a powder, a syrup, and combinations thereof.

[0432] The preparations made from the organism (e.g. non-human organism, e.g. plants or parts thereof, bacteria, yeast, insect, etc.) of the present invention can be formulated in any of a variety of forms utilized by the cosmetic industry, including but not limited to, creams, lotions, oils, powders, solutions, gels, sprays, ointments, salves, soap, wash, lipsticks, fingernail and toe nail polish, eye and facial makeup, perfumes, aftershaves, manicures, permanent waves, shaving foams and creams, shampoos, conditioners, hair colors, hair sprays and gels, deodorants, baby products, bath oils, bubble baths, bath salts, butters and many other types of products.

[0433] The CTFA Cosmetic Ingredient Handbook, Second Edition (1992), incorporated herein by reference, describes a wide variety of non-limiting cosmetic ingredients commonly used in the skin care industry, which are suitable for use in the compositions of the present invention. Examples of these ingredient classes include: abrasives, absorbents, aesthetic components such as fragrances, pigments, colorings/colorants, essential oils, skin sensates, astringents, etc. (e.g., clove oil, menthol, camphor, eucalyptus oil, eugenol, menthyl lactate, witch hazel distillate), anti-acne agents, anti-caking agents, antifoaming agents, antimicrobial agents (e.g., iodopropyl butylcarbamate), antioxidants, binders, biological additives, buffering agents, bulking agents, chelating agents, chemical additives, colorants, cosmetic astringents, cosmetic biocides, denaturants, drug astringents, external analgesics, film formers or materials, e.g., polymers, for aiding the film-forming properties and substantivity of the composition (e.g., copolymer of eicosene and vinyl pyrrolidone), opacifying agents, pH adjusters, propellants, reducing agents, sequestrants, skin-conditioning agents (e.g., humectants, including miscellaneous and occlusive), skin soothing and/or healing agents (e.g., panthenol and derivatives (e.g., ethyl panthenol), aloe vera, pantothenic acid and its derivatives, allantoin, bisabolol, and dipotassium glycyffhizinate), skin treating agents, thickeners, and vitamins and derivatives thereof.

[0434] The preparations made from the organism (e.g. non-human organism, e.g. plants or parts thereof, bacteria, yeast, insect, etc.) of the present invention can be formulated in a cleaning composition (e.g. soap, detergent, liquid, etc.) in any of a variety of suitable forms and for use of various purposes (e.g. cleaning of laundry, dishes, household, surfaces, textiles, automobiles, etc.). The Handbook for Cleaning/Decontamination of Surfaces 2007, incorporated herein by reference, describes a wide variety of non-limiting uses of cleaning products and formulations thereof, which are suitable for use in the compositions of the present invention.

[0435] In a further aspect the invention, the preparations made from the organism (e.g. non-human organism, e.g. plants or parts thereof, bacteria, yeast, insect, etc.) of the present invention (e.g. oil comprising secondary metabolites including terpenes, terpenoids and cannabinoids) can be used by a subject (e.g. human) for recreational purposes.

[0436] In a further aspect the invention, there is provided a food or processed product (e.g., dry, liquid, paste) obtainable from the organism (e.g. non-human organism, e.g. plant, bacteria, yeast, insect, etc.) of some embodiments of the invention. A food or processed product is any ingestible preparation containing the plant, or parts thereof, of the instant invention, or preparations made from these plants or parts thereof (or from the other organisms described herein). Thus, the plants, plant parts, or preparations obtained therefrom (or from the other organisms described herein) are suitable for human (or animal) consumption. Also provided are feed products adapted for animal consumption.

[0437] The food or processed product of the present invention can also include additional additives such as, for example, sweeteners, flavorings, colors, preservatives, nutritive additives such as vitamins and minerals, condiments, amino acids (i.e. essential amino acids), emulsifiers, pH control agents such as acidulants, hydrocolloids, antifoams and release agents, flour improving or strengthening agents, raising or leavening agents, cohesive agents, gases and chelating agents, the utility and effects of which are well-known in the art. See Merriani-Websters Collegiate Dictionary, 10th Edition, 1993.

[0438] According to a specific embodiment, the food or processed product obtainable from the organism (e.g. non-human organism, e.g. plant, bacteria, yeast, insect, etc.) of some embodiments of the invention is an oil.

[0439] According to one embodiment, the oil is an essential oil.

[0440] According to specific embodiments the oil is a cannabis oil.

[0441] According to a specific embodiment, the food or processed product (e.g. oil) comprises a DNA of the organism (e.g. non-human organism, e.g. plant, bacteria, yeast, insect, etc.).

[0442] It is expected that during the life of a patent maturing from this application many relevant terpene synthases and transporters will be developed and the scope of the term “terpene synthase” and “transporter” is intended to include all such new technologies a priori.

[0443] As used herein the term “about” refers to ±10%.

[0444] The terms “comprises”, “comprising”, “includes”, “including”, “having” and their conjugates mean “including but not limited to”.

[0445] The term “consisting of” means “including and limited to”.

[0446] The term “consisting essentially of” means that the composition, method or structure may include additional ingredients, steps and/or parts, but only if the additional ingredients, steps and/or parts do not materially alter the basic and novel characteristics of the claimed composition, method or structure.

[0447] As used herein, the singular form “a”, “an” and “the” include plural references unless the context clearly dictates otherwise. For example, the term “a compound” or “at least one compound” may include a plurality of compounds, including mixtures thereof.

[0448] Throughout this application, various embodiments of this invention may be presented in a range format. It should be understood that the description in range format is merely for convenience and brevity and should not be construed as an inflexible limitation on the scope of the invention. Accordingly, the description of a range should be considered to have specifically disclosed all the possible subranges as well as individual numerical values within that range. For example, description of a range such as from 1 to 6 should be considered to have specifically disclosed subranges such as from 1 to 3, from 1 to 4, from 1 to 5, from 2 to 4, from 2 to 6, from 3 to 6 etc., as well as individual numbers within that range, for example, 1, 2, 3, 4, 5, and 6. This applies regardless of the breadth of the range.

[0449] Whenever a numerical range is indicated herein, it is meant to include any cited numeral (fractional or integral) within the indicated range. The phrases “ranging/ranges between” a first indicate number and a second indicate number and “ranging/ranges from” a first indicate number “to” a second indicate number are used herein interchangeably and are meant to include the first and second indicated numbers and all the fractional and integral numerals therebetween.

[0450] As used herein the term “method” refers to manners, means, techniques and procedures for accomplishing a given task including, but not limited to, those manners, means, techniques and procedures either known to, or readily developed from known manners, means, techniques and procedures by practitioners of the chemical, pharmacological, biological, biochemical and medical arts.

[0451] As used herein, the term “treating” includes abrogating, substantially inhibiting, slowing or reversing the progression of a condition, substantially ameliorating clinical or aesthetical symptoms of a condition or substantially preventing the appearance of clinical or aesthetical symptoms of a condition.

[0452] It is appreciated that certain features of the invention, which are, for clarity, described in the context of separate embodiments, may also be provided in combination in a single embodiment. Conversely, various features of the invention, which are, for brevity, described in the context of a single embodiment, may also be provided separately or in any suitable subcombination or as suitable in any other described embodiment of the invention. Certain features described in the context of various embodiments are not to be considered essential features of those embodiments, unless the embodiment is inoperative without those elements.

[0453] Various embodiments and aspects of the present invention as delineated hereinabove and as claimed in the claims section below find experimental support in the following examples.

[0454] It is understood that any Sequence Identification Number (SEQ ID NO) disclosed in the instant application can refer to either a DNA sequence or a RNA sequence, depending on the context where that SEQ ID NO is mentioned, even if that SEQ ID NO is expressed only in a DNA sequence format or a RNA sequence format. For example, SEQ ID NO: 58 is expressed in a DNA sequence format (e.g., reciting T for thymine), but it can refer to either a DNA sequence that corresponds to a terpene synthase nucleic acid sequence, or the RNA sequence of an RNA molecule nucleic acid sequence. Similarly, though some sequences are expressed in a RNA sequence format (e.g., reciting U for uracil), depending on the actual type of molecule being described, it can refer to either the sequence of a RNA molecule comprising a dsRNA, or the sequence of a DNA molecule that corresponds to the RNA sequence shown. In any event, both DNA and RNA molecules having the sequences disclosed with any substitutes are envisioned.

### EXAMPLES

[0455] Reference is now made to the following examples, which together with the above descriptions, illustrate the invention in a non-limiting fashion.

[0456] Generally, the nomenclature used herein and the laboratory procedures utilized in the present invention include molecular, biochemical, microbiological and recombinant DNA techniques. Such techniques are thoroughly explained in the literature. See, for example, “Molecular Cloning: A laboratory Manual” Sambrook et al., (1989); “Current Protocols in Molecular Biology” Volumes I-III Ausubel, R. M., ed. (1994); Ausubel et al., “Current Protocols in Molecular Biology”, John Wiley and Sons, Baltimore, Md. (1989); Perbal, “A Practical Guide to Molecular Cloning”, John Wiley & Sons, New York (1988); Watson et al., “Recombinant DNA”, Scientific American Books, New York; Birren et al. (eds) “Genome Analysis: A Laboratory Manual Series”, Vols. 1-4, Cold Spring Harbor Laboratory Press, New York (1998); methodologies as set forth in U.S. Pat. Nos. 4,666,828; 4,683,202; 4,801,531; 5,192,659 and 5,272,057; “Cell Biology: A Laboratory Handbook”, Volumes I-III Cellis, J. E., ed. (1994); “Current Protocols in Immunology” Volumes 1-111 Coligan J. E., ed. (1994); Stites et al. (eds), “Basic and Clinical Immunology” (8th Edition), Appleton & Lange, Norwalk, Conn. (1994); Mishell and Shiigi (eds), “Selected Methods in Cellular Immunology”, W. H. Freeman and Co., New York (1980); available immunoassays are extensively described in the patent and scientific literature, see, for example, U.S. Pat. Nos. 3,791,932; 3,839,153; 3,850,752; 3,850,578; 3,853,987; 3,867,517; 3,879,262; 3,901,654; 3,935,074; 3,984,533; 3,996,345; 4,034,074: 4,098,876; 4,879,219; 5,011,771 and 5,281,521; “Oligonucleotide Synthesis” Gait, M. J., ed. (1984); “Nucleic Acid Hybridization” Hames, B. D., and Higgins S. J., eds. (1985); “Transcription and Translation” Hames, B. D., and Higgins S. J., Eds. (1984); “Animal Cell Culture” Freshney, R. I., ed. (1986); “Immobilized Cells and Enzymes” IRL Press, (1986); “A Practical Guide to Molecular Cloning” Perbal, B., (1984) and “Methods in Enzymology” Vol. 1-317, Academic Press; “PCR Protocols: A Guide To Methods And Applications”, Academic Press, San Diego, Calif. (1990); Marshak et al., “Strategies for Protein Purification and Characterization—A Laboratory Course Manual” CSHL Press (1996); all of which are incorporated by reference as if fully set forth herein. Other general references are provided throughout this document. The procedures therein are believed to be well known in the art and are provided for the convenience of the reader. All the information contained therein is incorporated herein by reference.

### General Materials and Experimental Procedures

[0457] Preparation of Enriched Glandular Capitate-Stalked Trichomes

[0458] The capitate-stalked trichome enrichment was conducted using a modified BeadBeater™ and fine mesh procedure previously described [Wu T et al., PLoS ONE (2012) 7(8): e41822].

[0459] Glandular trichomes were isolated from C. sativa plants. Mature female inflorescences were placed into a 350 ml bead beater chamber (BioSpec Products, Inc., Bartlesville, Okla., USA). The chamber was filled with 80-100 g of 0.5 mm diameter glass beads, 1% PVP soluble 360,000 MW and 0.6% Methylcellulose and ice-cold gland wash buffer (50 mM Tris-ICL, pH 7.5, 200 mM Sorbitol, 20 mM Sucrose, 10 mM KCl, 5 mM MgCl₂, 0.5 mM HK₂PO₄, 5 mM succininc acid, 1 mM EGTA, 1 mM Aurintricarboxylic acid, 14 mM b-nercaptoethanol). The BeadBeater was turned on for 5 minutes.

[0460] Following the bead beater procedure, the trichomes were separated from the plant material and glass beads by passing the supernatant of the chamber through a 350-μm sieve. The residual plant material and beads were rinsed twice with ice-cold gland wash buffer and passed again through the 350-μm sieve. The combined filtrates (with ice-cold gland wash buffer) were then consecutively filtered through 150-μm, 105-μm, 80-μm and 50-μm sieves. The resulting filtrate was collected and centrifuged for 2.5 min at 2500 rpm. Subsequently, the supernatant was decanted and the pellet was stored in −80° C. The purity of the purified trichome fraction was confirmed by inspecting the samples using a light microscope.

[0461] RNA Extraction Method

[0462] RNA was extracted from the aforementioned isolated trichomes and 6-week old female inflorescences of four different varieties of Cannabis sativa. RNA extraction was conducted using a poly-A based strategy of mRNA purification [Spectrum™ Plant Total RNA Kit (SIGMA-ALDRICH)]. The isolated trichomes and inflorescences underwent the initial immersion in lysis buffer as following. 50 mg of isolated trichomes were suspended in lysis solution, vortexed for 30 seconds, and inserted for 5 minutes in an ice-cold desiccator. 50 mg of inflorescences were suspended in lysis solution and vortexed for 30 seconds. Both fractions were subsequently treated as described in the Spectrum™ Plant Total RNA Kit.

[0463] The RNA samples were analyzed for gene expression following preparation of RNAseq libraries and high throughput sequencing via Illumina technology. The RNA library preparation was conducted using a TruSeq mRNA RNAseq library preparation kit (Illumina).

[0464] The Statistics Ofthe RNAseq Results

[0465] Raw reads were filtered and cleaned using Trimmomatic [Bolger, A. M., et al. Bioinformatics. (2014) 30(15)-2114-20] to remove adapters and the FASTX-Toolkit version 0.0.13.2 for (1) trimming read-end nucleotides with quality scores <30 using fastq_quality_trimmer and (2) removing reads with <70% base pairs with quality score ≤30 using fastq_quality_filter. TopHat2 [Trapnell C. et al., Nat Biotechnol. (2010) 28:511) was used to map the clean reads onto the cannabis genome reference (A physical and genetic map of Cannabis sativa identifies extensive rearrangements at the THC/CBD acid synthase loci. Laverty K. U., et al. Genome Res. (2019) 29(1):146-156]. The genomic version used for gene analysis and prediction based on the RNAseq data was GCA_000230575.3_ASM23057v3_genomic, downloaded from NCBI: ftp://ftp(dot)ncbi(dot)nlm(dot)nih(dot)gov/genomes/all/GCA/000/230/575/GCA_000230 575.3_ASM23057v3/GCA_000230575.3_ASM23057v3_genomic.fna.gz.

[0466] Expression of Terpene Synthases Genes

[0467] Putative terpene synthase genes were synthesized by the TWIST Co., and cloned into Novagen pET-28a(+) with a 6×His tag at its' N-terminus. The recombinant plasmid was then sequenced for authentication and transformed into BL21(DE3) pLysS and pLysE strains of E. coli (Agilent Technologies) for heterologous expression. An overnight culture was used to inoculate a 20-200 mL culture, induced with 0.1 mM IPTG at an OD 600 nm >0,8 for initiation of recombinant protein translation then incubated at 18° C. and 250 RPM overnight. The cells were collected by centrifugation and the recombinant enzymes were extracted either as a crude extract or purified on a Ni-NTA agarose resin as previously described [Gonda I. et al., The Plant Journal (2013) 61, 458-472].

[0468] Terpene Synthases Activity Assay

[0469] To determine the terpene synthase catalytic activity, reaction mixtures containing 100 μl of protein extract or purified protein were incubated overnight at 30° C. with either 10 μM geranyl diphosphate (GPP) or farnesyl diphosphate (FPP), in a final volume of 200 μl using a buffer containing 50 mM bis-tris, pH 6.9, 1 mM DTT, 10% (v/v) glycerol, 0.1 mM of MnCl2 and 10 mM of MgCl2. The volatiles produced were extracted by solid-phase microextraction (SPME) according to the methodology previously described [Iijima Y. et al., Plant Physiol (2004) 136: 3724-3736]. As controls, reactions were carried out without the cofactors MnCl2 and MgCl2, or protein extracts were heat inactivated by incubation at 100° C. for 5 minutes, or a short peptide product of an empty pET100 vector was utilized.

[0470] For solid-phase microextraction (SPME) analysis, a 57298-U SPME fiber assembly Divinylbenzene/Carboxen/Polydimethylsiloxane (DVB/CAR/PDMS, Supelco) needle size 23 ga, StableFlex, was used with an autosampler and analyzed by GC-MS as previously described [Davidovich-Rikanati R. et al., Nature Biotech (2007) 25:899-901; Davidovich-Rikanati R. et al., Plant J (2008) 56:228-238]. The SPME fiber were adsorbed for 30 min. by automatic HS-SPME at 50° C. followed by injection of the fiber into a GC-MS injection port for 5 min. (splitless), for desorption of the volatiles. Chiral separation was conducted on a Restek Rt™-bDEXsm column (30 m length 0.25 mm i.d., 0.25 μm film thickness, 2,3-di-O-methyl-6-O-tert-butyl dimethylsilyl beta cyclodextrin added into 14% cyanopropylphenyl/86% dimethyl polysiloxane). Helium (0.8 ml min-1) was used as a carrier gas with splitless injection. The injector temperature was 250° C., and the detector temperature was 230° C. The following conditions were used: initial temperature 40° C. for 5 min., followed by a ramp of 2° C./min. to 110° C., and 10° C./min up to 230° C. (5 min.). A quadrupole mass detector with electron ionization at 70 eV was used to acquire the MS data in the range of 41 to 350 m/z. The identification of the volatiles was assigned by comparison spectral data with the W10N11 and HPCH2205 GC-MS libraries and with authentic standard when available.

[0471] Selection of ABC and PTR Transporter Genes

[0472] A list of the Cannabis sativa ABC and PTR transporter genes was prepared based on the available Cannabis genomes (www(dot)medicinalgenomics(dot)com, and genome(dot)ccbr(dot)utoronto(dot)ca/FAQ/). GCA_000230575.3_ASM23057v3_genomic was downloaded from NCBI: ftp(dot)ncbi(dot)nlm(dot)nih(dot)gov/genomes/all/GCA/000/230/575/GCA_000230575.3_ASM23057v3/GCA_000230575.3_ASM23057v3_genomic.fna.gz and the gene expression data based on the RNA-seq analysis described above for the members of the transporter family was prepared. Genes with the highest level of enrichment in the highly-purified trichome fraction were selected for functional expression. Six ABC and PTR-transporter genes expressing the highest enrichment were selected, and their complete cDNA sequence was determined based on the RNA-seq sequencing. In addition to these six genes, homologous genes sharing adjacent genomic proximity (tandem genes) to these genes were chosen, totaling 12 selected genes.

[0473] Expression of ABC and PTR Transporter Genes in Yeast and Tobacco

[0474] The genes were expressed in yeast and tobacco. For yeast, the ABC and PTR Transporter genes were synthesized by the TWIST Co, cloned and expressed (individually) in the yeast expression vector pESC-URA (Agilent Technologies) for expression under the yeast native gal-10 promoter. Competent Saccharomyces cerevisiae (strain Y1HGold, CloneTech) cells were prepared, transformed by each of the resulting vector and selected on yeast synthetic media lacking Uracil as previously described [GietzR. D., Methods Mol. Biol. (2014) 1205:1-12].

[0475] For tobacco, the ABC and PTR Transporter genes were cloned into a plant binary expression vector (pGreen 0029) via Agrobacterium mediated transformation as previously described [Cohen, S. et at, Nat. Commun. (2014) 5:4026]. These genes were cloned between the cauliflower mosaic virus (CaMl,) 35S promoter and the polyadenylation signal from the nopaline synthase gene and inserted into tobacco BY2 cells and plants (var. Samson) via stable transformation..

[0476] Evaluation of the Cannabis ABC and PTR Transporter's Toxicity Reduction Effect of Terpenes and Cannabinoids in Yeast

[0477] The rescue from terpene and cannabinoid toxicity in cell culture is assessed by analyzing the growth inhibition effect of various monoterpenes or cannabinoids on a matrix of yeast cells harboring an empty vector, vectors expressing ABC or PTR Transporters or wild-type cells. The Terpene and Cannabinoid toxic effect is assessed based on a procedure consisting plate assays as previously described [Demissie Z. A. et al., Planta (2018) 10.1007/s00425-018-3064-x].

[0478] Yeast cells are grown to OD600 of approximately 1.0, streaked on YPD plate, followed by placing three filter disks per plate at equal distances. The filter disks are infused with 20 μl of DMSO containing various concentrations of Terpenes and Cannabinoids and incubated at 30° C. for 72 hours. The inhibition zone is calculated by measuring the diameter of the yeast clear area around the filter disk, and the toxic effect is correlated accordingly.

[0479] An alternative method is to measure the yeast growth as a function of turbidity. Transformed yeast cells were grown on URA-glucose broth at 30° C. at 200 RPM, and after 24 hours 100 μl was used to inoculate 5 ml of URA-galactose broth in the same conditions till O.D.600 of 1.5. The yeast was further diluted to OD600=0.05 with 10 ml URA-galactose, and divided into two 5 ml aliquots into separate 50 ml falcon tubes. The first falcon (control) was added 78 μl acetonitrile (the solvent that the CBD was dissolved in), and the second one was added 78 μl CBD solution in acetonitrile (final CBD concentration=0.5 mM). The samples were incubated for 2-8 hours in 30° C. at 250 RPM, and their growth/turbidity at OD600 was assessed in intervals of one hour.

[0480] Measurement of Uptake of CBD into Yeast and BY-2 Cells

[0481] An additional strategy for determining transporter function is to measure the amount of exogenous CBD taken up and incorporated into the cells.

[0482] Yeast Cells

[0483] Transformed yeast cells were grown on URA-glucose broth at 30° C. at 200 RPM, and after 24 hours 100 μl was used to inoculate 5 ml of URA-galactose broth in the same conditions till OD₆₀₀ of 1.5 ml. The yeast was incubated with 0.5 mM CBD for 2-8 hours in 30° C. at 100 RPM, then centrifuged at 15000 g for 1 minute, and washed twice with 1 ml distilled water. The pellet was weighed and underwent HPLC analysis to determine the pellet's CBD content. The pellet was extracted in 1 ml methanol, and following centrifugation and filter was analyzed by HPLC using a diode-array detector and CBD was quantified against a commercial standard.

[0484] BY2 Tobacco Cells

[0485] 2.5 ml of newly diluted transformed BY2 cells were incubated with 0.5 mM CBD for 8 hours in 25° C. at 100 RPM, then centrifuged at 15000 g for 1 minute, and washed twice with 1 ml distilled water. The pellet was weighed and underwent HPLC analysis to determine the pellet CBD content, as indicated above.

[0486] Measurement of Uptake of Terpenes into Yeast

[0487] Transformed yeast cells were grown on URA-glucose broth at 30° C. at 200 RPM, and after 24 hours 100 μl was used to inoculate 5 ml of URA-galactose broth in the same conditions till OD600 of 1.5. 1.5 ml of the yeast was incubated with limonene (0.2 mM), caryophyllene (0.2 mM) or alpha-pinene (0.3 mM) for 2 hours in 30° C. at 100 RPM, then centrifuged at 15000 g for 1 minute, and washed twice with 1 ml distilled water. The pellet was weighed and extracted in 1 ml MTBE, underwent an overnight vortex, and following centrifugation and filter was analyzed by GC-MS as for the analysis of terpenes following extraction by solid-phase microextraction (SPME) according to the methodology previously described [Iijima Y. et al., Plant Physiol (2004) 136: 3724-3736] and the terpenes were quantified against a commercial standard.

[0488] Evaluation of the Cannabis ABC and PTR Transporter's Toxicity Reduction Effect of Terpenes and Cannabinoids in Tobacco Cells

[0489] The toxic effect and cell death activity of terpenes and cannabinoids in tobacco was assessed on cell cultures as follows: 7-day-old suspension cultured BY-2 tobacco cells at a 5-fold dilution in logarithmic growth phase, incubated in Gamborg B5 medium, was incubated in the presence of 0.5 mM CBD for 48 hours as previously described [Sirikantaramas S. et al., Plant Cell Physiol. (2005) 46:1578-1582].

[0490] Cell death in the samples was evaluated using the cell viability indicator fluorescein diacetate (FDA, Sigma-Aldrich). Cell suspension (2.5 mL) was stained with 50 μL of 0.5% fluorescein diacetate (FDA) dissolved in acetone for 10 min. The cells were rinsed three times with I mL isotonic medium to remove excess staining solution. Viability was assessed immediately using an Olympus BX50 fluorescence microscope equipped with a suitable barrier filter (excitation 460-490 nm and emission 510 nm). FDA staining of viable cells results in bright green fluorescence, while nonviable cells remain colorless.

### Example 1

### Identifying Terpene Synthases from Cannabis

[0491] 45 full length terpene synthase genes of the a, b and g terpene synthase families were identified and established as the TPS used herein (see Table 1, below).

TABLE 1
Amino acid sequences of the 45 identified gene products

| Terpene Synthase Gene | | |
|---|---|---|
| (according to chromosomal | Amino Acid | Nucleic Acid |
| position) | Sequence | Sequence |
| 790-1 | SEQ ID NO: 1 | SEQ ID NO: 58 |
| 790-2 | SEQ ID NO: 2 | SEQ ID NO: 59 |
| 790-3 | SEQ ID NO: 3 | SEQ ID NO: 60 |
| 790-4 | SEQ ID NO: 4 | SEQ ID NO: 61 |
| 790-5 | SEQ ID NO: 5 | SEQ ID NO: 62 |
| 792-1 | SEQ ID NO: 6 | SEQ ID NO: 63 |
| 792-2 | SEQ ID NO: 7 | SEQ ID NO: 64 |
| 792-3 | SEQ ID NO: 8 | SEQ ID NO: 65 |
| 792-4 | SEQ ID NO: 9 | SEQ ID NO: 66 |
| 792-5 | SEQ ID NO: 10 | SEQ ID NO: 67 |
| 792-6 | SEQ ID NO: 11 | SEQ ID NO: 68 |
| 792-7 | SEQ ID NO: 12 | SEQ ID NO: 69 |
| 792-8 | SEQ ID NO: 13 | SEQ ID NO: 70 |
| 792-9 | SEQ ID NO: 14 | SEQ ID NO: 71 |
| 793-1 | SEQ ID NO: 15 | SEQ ID NO: 72 |
| 793-2 | SEQ ID NO: 16 | SEQ ID NO: 73 |
| 794-1 | SEQ ID NO: 17 | SEQ ID NO: 74 |
| 795-1 | SEQ ID NO: 18 | SEQ ID NO: 75 |
| 795-2 | SEQ ID NO: 19 | SEQ ID NO: 76 |
| 795-3 | SEQ ID NO: 20 | SEQ ID NO: 77 |
| 796-1 | SEQ ID NO: 21 | SEQ ID NO: 78 |
| 796-2 | SEQ ID NO: 22 | SEQ ID NO: 79 |
| 796-3 | SEQ ID NO: 23 | SEQ ID NO: 80 |
| 796-4 | SEQ ID NO: 24 | SEQ ID NO: 81 |
| 796-5 | SEQ ID NO: 25 | SEQ ID NO: 82 |
| 796-7 | SEQ ID NO: 26 | SEQ ID NO: 83 |
| 796-8 | SEQ ID NO: 27 | SEQ ID NO: 84 |
| 798-1 | SEQ ID NO: 28 | SEQ ID NO: 85 |
| 798-2 | SEQ ID NO: 29 | SEQ ID NO: 86 |
| 799-1 | SEQ ID NO: 30 | SEQ ID NO: 87 |
| 799-2 | SEQ ID NO: 31 | SEQ ID NO: 88 |
| 799-3 | SEQ ID NO: 32 | SEQ ID NO: 89 |
| 799-4 | SEQ ID NO: 33 | SEQ ID NO: 90 |
| 799-5 | SEQ ID NO: 34 | SEQ ID NO: 91 |
| 799-5a | SEQ ID NO: 35 | SEQ ID NO: 92 |
| AG046-1 | SEQ ID NO: 36 | SEQ ID NO: 93 |
| AG1075-1 | SEQ ID NO: 37 | SEQ ID NO: 94 |
| AG2522-1 | SEQ ID NO: 38 | SEQ ID NO: 95 |
| AG3403-1 | SEQ ID NO: 39 | SEQ ID NO: 96 |
| AG3403-2 | SEQ ID NO: 40 | SEQ ID NO: 97 |
| AG3908-1 | SEQ ID NO: 41 | SEQ ID NO: 98 |
| AG4076-1 | SEQ ID NO: 42 | SEQ ID NO: 99 |
| AG7638-1 | SEQ ID NO: 43 | SEQ ID NO: 100 |
| S600-1 | SEQ ID NO: 44 | SEQ ID NO: 101 |
| S1328-1 | SEQ ID NO: 45 | SEQ ID NO: 102 |

[0492] The genes were named following their chromosomal position (e.g. 792-1 for chromosome named 790 to 799, and the relative positions of each gene on the chromosome), or presence on a small scaffold not yet placed on any of the 10 chromosomes (e.g., AGXXX, Sxxx) as shown in Table 2. Thus, for example, the genes on chromosome 6 were termed 796-1, 796-2, 796-3, 796-4, 796-5, 796-7, and 796-8. Generally, the closely spaced genes are the result of evolutionary tandem duplications and thus have highly similar sequences.

[0493] Sequence alignments allowed for the classification of the TPS into predicted cyclic monoterpene synthases (family b), non-cyclic monoterpene synthases (family g), and sesquiterpene synthases (family a). The genomic coordinates of the individual genes are listed in Table 2 (below) and serve to characterize the introgression that may be followed in a breeding program.

TABLE 2
Genomic coordinates of the cannabis TPS genes

| Gene | Chromosome | Start bp | End bp |
|---|---|---|---|
| (new name) | (contig) | (genome start bp) | (genome end bp) |
| 790-1 | CM010790.1 | 2632226 | 2640191 |
| 790-2 | CM010790.1 | 2644932 | 2649253 |
| 790-3 | CM010790.1 | 3181246 | 3195135 |
| 790-4 | CM010790.1 | 3232611 | 3238021 |
| 790-5 | CM010790.1 | 3264188 | 3269148 |
| 792-1 | CM010792.1 | 820621 | 824457 |
| 792-2 | CM010792.1 | 1903370 | 1907666 |
| 792-3 | CM010792.1 | 1918918 | 1924206 |
| 792-4 | CM010792.1 | 9022466 | 9025748 |
| 792-5 | CM010792.1 | 9357211 | 9361536 |
| 792-6 | CM010792.1 | 9627543 | 9629928 |
| 792-7 | CM010792.1 | 57117886 | 57123968 |
| 792-8 | CM010792.1 | 75105984 | 75111432 |
| 792-9 | CM010792.1 | 75111190 | 75137262 |
| 793-1 | CM010793.1 | 43922210 | 43933552 |
| 793-2 | CM010793.1 | 43957596 | 43963179 |
| 794-1 | CM010794.1 | 1010638 | 1018837 |
| 795-1 | CM010795.2 | 17856832 | 17859188 |
| 795-2 | CM010795.2 | 17877618 | 17880153 |
| 795-3 | CM010795.2 | 17913211 | 17920796 |
| 796-1 | CM010796.2 | 10493362 | 10496651 |
| 796-2 | CM010796.2 | 10518048 | 10521638 |
| 796-3 | CM010796.2 | 10534390 | 10537972 |
| 796-4 | CM010796.2 | 38322420 | 38325367 |
| 796-5 | CM010796.2 | 52162308 | 52166849 |
| 796-7 | CM010796.2 | 52202797 | 52206934 |
| 796-8 | CM010796.2 | 52211106 | 52216657 |
| 798-1 | CM010798.2 | 32376874 | 32385064 |
| 798-2 | CM010798.2 | 40593521 | 40596699 |
| 799-1 | CM010799.2 | 22504768 | 22509388 |
| 799-2 | CM010799.2 | 22528277 | 22531870 |
| 799-3 | CM010799.2 | 22546241 | 22559267 |
| 799-4 | CM010799.2 | 47131972 | 47138311 |
| 799-5 | CM010799.2 | 47141564 | 47156143 |
| 799-5a | CM010799.2 | 47141564 | 47156143 |
| AG046-1 | AGQN03000461.1 | 3304 | 5576 |
| AG1075-1 | AGQN03001075.1 | 25596 | 39369 |
| AG2522-1 | AGQN03002522.1 | 98042 | 108660 |
| AG3403-1 | AGQN03003403.1 | 13043 | 20959 |
| AG3403-2 | AGQN03003403.1 | 25690 | 37016 |
| AG3908-1 | AGQN03003908.1 | 1499 | 8204 |
| AG4076-1 | AGQN03004076.1 | 40892 | 48479 |
| AG7638-1 | AGQN03007638.1 | 535 | 5572 |

[0494] The closest reported homolog of each of the 45 genes, as identified by BLAST of the NCBI database is shown in Table 3.

TABLE 3
Homologs of each of the TPS genes

| Gene name | Closest homolog | Closest organism | % identity |
|---|---|---|---|
| 790-1 | ARE72258 | Cannabis sativa | 89 |
| 790-2 | ARE72259 | Cannabis sativa | 97 |
| 790-3 | ARE72257 | Cannabis sativa | 92 |
| 790-4 | A7IZZ1 | Cannabis sativa | 99 |
| 790-5 | ARE72255 | Cannabis sativa | 100 |
| 792-1 | ARE72252 | Cannabis sativa | 94 |
| 792-2 | ARE72252 | Cannabis sativa | 96 |
| 792-3 | ARE72260 | Cannabis sativa | 99 |
| 792-4 | ACI32640.1 | Humulus lupulus | 75 |
| 792-5 | ACI32640.1 | Humulus lupulus | 75 |
| 792-6 | XP-015902224.1 | Ziziphus jujuba | 49 |
| 792-7 | XP-015902224.1 | Ziziphus jujuba | 51 |
| 792-8 | XP-015902224.1 | Ziziphus jujuba | 51 |
| 792-9 | XP-015902224.1 | Ziziphus jujuba | 50 |
| 793-1 | ARE72250 | Cannabis sativa | 82 |
| 793-2 | ARE72252 | Cannabis sativa | 76 |
| 794-1 | ARE72260 | Cannabis sativa | 66 |
| 795-1 | ARE72256 | Cannabis sativa | 74 |
| 795-2 | ARE72256 | Cannabis sativa | 72 |
| 795-3 | ARE72256 | Cannabis sativa | 71 |
| 796-1 | XP-015886715.1 | Ziziphus jujuba | 59 |
| 796-2 | XP-010098578.1 | Morus notabilis | 60 |
| 796-3 | XP-010088087.1 | Morus notabilis | 61 |
| 796-4 | CBI20483.3 | Vitis vinifera | 61 |
| 796-5 | ACI32640.1 | Humulus hipulus | 75 |
| 796-7 | ACI32640.1 | Humulus lupulus | 75 |
| 796-8 | ACI32639.1 | Humulus lupulus | 75 |
| 798-1 | ARE72256 | Cannabis sativa | 96 |
| 798-2 | XP-010109558.1 | Morus notabilis | 65 |
| 799-1 | ARE72252 | Cannabis sativa | 95 |
| 799-2 | ARE72250 | Cannabis sativa | 99 |
| 799-3 | ARE72252 | Cannabis sativa | 89 |
| 799-4 | ARE72252 | Cannabis sativa | 91 |
| 799-5 | ARE72250 | Cannabis sativa | 98 |
| 799-5a | ARE72250 | Cannabis sativa | 98 |
| AG0461-1 | ARE72256 | Cannabis sativa | 72 |
| AG1075-1 | ARE72254 | Cannabis sativa | 79 |
| AG2522-1 | ARE72251 | Cannabis sativa | 99 |
| AG3403-1 | ARE72258 | Cannabis sativa | 89 |
| AG3403-2 | ARE72259 | Cannabis sativa | 97 |
| AG3908-1 | ARE72254 | Cannabis sativa | 91 |
| AG4076-1 | ARE72256 | Cannabis sativa | 97 |
| AG7638-1 | ARE72254 | Cannabis sativa | 91 |
| S600-1 | ARE72252 | Cannabis sativa | 77 |
| S1328-1 | PON82650 | Trema orientale | 73 |

Of note, % identity of each protein sequence was identified by BLASTP. Nearest homolog not identified by species binomial is from Cannabis sativa species.

[0495] In order to determine which members of the TPS are preferentially expressed in the inflorescence trichomes, and which are associated with non-trichome cells, gene expression was compared between whole inflorescence tissue and a partially purified trichome fraction derived from inflorescence tissue. As the terpene production is thought to be restricted to the Cannabis trichomes, a differential expression analysis of plant tissues consisting of a trichome purification gradient was conducted.

[0496] Gene expression of the enriched trichome fraction was compared to that of the whole female inflorescence. RNA was extracted from ca 6-week old inflorescences of four different varieties of Cannabis sativa used for medicinal purposes in Israel (referred to herein as Var CSI1, CS12, CS13, CS14). In addition, the enriched trichome fraction of the inflorescence from variety CS14 was extracted for RNA using the same RNA extraction method.

[0497] The statistics of the RNAseq results are presented in Table 4, below.

TABLE 4
The statistics of the RNAseq results

| | | | | Percent mapping vs. |
|---|---|---|---|---|
| | | | | Genome (indicates |
| | | | | % reads successfully |
| | No. | No. | No. | identified as homologous |
| Sample | raw-reads | clean-reads | clean-reads | to the Cannabis genome) |
| CS11 | 11323706 | 10919965 | 96.43455 | 84.4 |
| inflorescence | | | | |
| CS12 | 9522705 | 9165590 | 96.24986 | 86.3 |
| inflorescence | | | | |
| CS13 | 10377699 | 10017573 | 96.52981 | 88.2 |
| inflorescence | | | | |
| CS14 | 10606649 | 10222341 | 96.37673 | 88 |
| inflorescence | | | | |
| CS14 | 21734921 | 20915436 | 96.2 | 83.0 |
| trichomes | | | | |

[0498] Table 5 (below) shows the gene expression results (FPKM, Fragments Per Kilobase Million) for the 45 TPS genes for the inflorescences of the four varieties, as well as for the enriched trichome fraction of Var CS14. Clear differences in specific gene expression were observed between the inflorescences of the four varieties. Thus, for example, terpene synthase 790-4 is expressed strongly in Var CS13 and based on the trichome enrichment in Var CS14 this gene is enriched 11.5 fold in the trichomes. Thus, among the 4 tested varieties, Var CS13 would be a good source in breeding for cannabis varieties containing the terpenes produced by this particular terpene synthase. Of the 45 TPS genes present in the genome, the expression of 21 were particularly enriched in the trichome fraction (more than 3×) of the only trichome-enriched variety (CS14). Since the whole inflorescence comprises the trichomes, there were no genes that were expressed only in the enriched trichome sample.

TABLE 5
Gene expression of the Cannabis TPS genes in 4 varieties inflorescences
and the enriched trichome fraction of Var CS14
(Numbers indicate FPKM values)

| | Var CS11- | Var CS12- | Var CS13- | Var CS14- | | |
|---|---|---|---|---|---|---|
| Gene | whole | whole | whole | whole | trichome | fold |
| name | inflorescence | inflorescence | inflorescence | inflorescence | Var CS14 | enrichment |
| 790-1 | 7.1 | 7.8 | 6.8 | 6.1 | 36.5 | 6.0 |
| 790-2 | 1.4 | 1.1 | 2.4 | 1.4 | 2.6 | 1.8 |
| 790-3 | 24.0 | 21.0 | 10.0 | 5.5 | 43.5 | 7.9 |
| 790-4 | 22.0 | 47.0 | 100.0 | 13.0 | 150.0 | 11.5 |
| 790-5 | 1.3 | 4.2 | 2.0 | 1.5 | 33.0 | 22.0 |
| 792-1 | 2.7 | 1.9 | 1.0 | 1.9 | 1.3 | 0.7 |
| 792-2 | 8.8 | 5.6 | 3.6 | 3.2 | 20.5 | 6.4 |
| 792-3 | 19.0 | 14.0 | 8.6 | 9.6 | 16.0 | 1.7 |
| 792-4 | 0.0 | 0.0 | 0.0 | 1.6 | 1.1 | 0.7 |
| 792-5 | 1.0 | 1.0 | 0.0 | 1.1 | 1.0 | 0.9 |
| 792-6 | 0.0 | 0.0 | 0.0 | 1.7 | 0.8 | 0.4 |
| 792-7 | 11.0 | 29.0 | 18.0 | 9.9 | 165.0 | 16.7 |
| 792-8 | 10.0 | 9.0 | 6.3 | 7.6 | 15.5 | 2.0 |
| 792-9 | 4.7 | 9.8 | 11.0 | 13.0 | 14.0 | 1.1 |
| 793-1 | 3.1 | 6.9 | 2.4 | 4.3 | 27.0 | 6.3 |
| 793-2 | 5.3 | 1.6 | 6.8 | 1.9 | 8.2 | 4.3 |
| 794-1 | 27.0 | 2.0 | 1.4 | 1.8 | 1.7 | 0.9 |
| 795-1 | 1.2 | 2.6 | 1.0 | 3.3 | 14.9 | 4.5 |
| 795-2 | 1.2 | 2.9 | 0.0 | 3.4 | 21.0 | 6.2 |
| 795-3 | 1.2 | 2.1 | 0.0 | 3.3 | 9.2 | 2.8 |
| 796-1 | 2.4 | 2.8 | 2.7 | 2.0 | 9.8 | 4.9 |
| 796-2 | 4.5 | 1.8 | 4.8 | 1.1 | 2.4 | 2.1 |
| 796-3 | 3.9 | 2.0 | 0.0 | 2.2 | 3.3 | 1.5 |
| 796-4 | 1.2 | 1.0 | 0.0 | 1.0 | 2.6 | 2.6 |
| 796-5 | 1.3 | 0.0 | 1.6 | 0.0 | 0.0 | 0.0 |
| 796-7 | 1.5 | 1.0 | 1.2 | 2.1 | 0.0 | 0.0 |
| 796-8 | 1.2 | 1.1 | 1.8 | 1.6 | 1.0 | 0.6 |
| 798-1 | 10.0 | 12.0 | 3.6 | 5.7 | 42.5 | 7.5 |
| 798-2 | 1.8 | 1.7 | 1.7 | 1.8 | 1.9 | 1.0 |
| 799-1 | 11.0 | 7.4 | 3.0 | 4.6 | 21.5 | 4.7 |
| 799-2 | 22.0 | 7.3 | 7.7 | 3.7 | 36.0 | 9.7 |
| 799-3 | 22.0 | 8.3 | 2.5 | 4.0 | 32.5 | 8.1 |
| 799-4 | 21.0 | 7.8 | 2.4 | 3.4 | 37.5 | 11.0 |
| 799-5 | 8.7 | 6.9 | 6.3 | 3.2 | 30.0 | 9.4 |
| AG0461-1 | 1.0 | 2.5 | 0.0 | 4.6 | 16.0 | 3.5 |
| AG1075-1 | 3.1 | 3.6 | 2.5 | 2.7 | 4.8 | 1.8 |
| AG2522-1 | 1.8 | 1.2 | 12.0 | 1.2 | 2.1 | 1.8 |
| AG3403-1 | 8.4 | 8.5 | 5.8 | 6.9 | 42.0 | 6.1 |
| AG3403-2 | 3.0 | 2.1 | 2.1 | 2.1 | 11.4 | 5.4 |
| AG3908-1 | 1.5 | 1.0 | 1.3 | 1.3 | 1.1 | 0.8 |
| AG4076-1 | 2.6 | 14.0 | 2.3 | 5.8 | 61.0 | 10.5 |
| AG7638-1 | 1.4 | 1.0 | 1.0 | 1.3 | 1.5 | 1.1 |

[0499] Since the trichomes are considered as the cells in which terpene synthesis as well as cannabinoid synthesis takes place, these results strongly support the roles of the identified genes in the synthesis of the trichome-specific terpenes of the Cannabis varieties. Reciprocally, those genes not showing enrichment of expression in the purified trichome preparation presumably are responsible for the volatile terpene composition of the cannabis tissues not enriched in trichomes, which also have use in cannabis consumption.

### Example 2

### Functional Expression of the Terpene Synthase Genes

[0500] The present inventors characterized the biochemical function of the individual genes. Putative terpene synthases were functionally expressed in bacteria and their enzymatic products identified using methods previously disclosed [Davidovich-Rikanati R. et al., Nature Biotech (2007) 25:899-901; Davidovich-Rikanati R. et al., Plant J (2008) 56:228-238; Gonda I. et al., The Plant Journal (2013) 61, 458-472; Iijima Y. et al., Plant Physiol (2004) 136: 3724-3736] and described in the ‘general materials and experimental procedures’ section above.

[0501] The functional expression of the 45 genes identified them as accountable for the synthesis of monoterpenes and sesquiterpenes, as illustrated for example, for the gene product of 792-3 (see Table 6, below).

TABLE 6
The functional expression of the terpene synthase genes

| TPS | Monoterpenes produced | Sesquiterpenes produced |
|---|---|---|
| expressed | with GPP | with FPP |
| 790-1 | (Z)-beta-ocimene and (E)- | |
| | beta-ocimene | |
| 790-2 | (Z)-beta-ocimene and (E)- | farnesene<(E,E)-alpha-> and |
| | beta-ocimene | unidentified sesquiterpene |
| 790-4 | D-limonene, alpha-pinene, | |
| | beta pinene | |
| 792-3 | | caryophyllene, humulene |
| 792-7 | beta-myrcene/geraniol | |
| 794-1 | | selina-3,7(11)-diene and |
| | | additional unidentified |
| | | sesquiterpenes |
| 795-1 | geraniol | curcumene, bisabolene, |
| | | bisabolol and several |
| | | additional unidentified |
| | | sesquiterpenes |
| 796-3 | geraniol | |
| 799-2 | beta-myrcene/ | gamma and delta-selinene and |
| | D-limonene/nerol | additional 10 unidentified |
| | | sesquiterpenes |
| 799-4 | myrcene | beta and alpha selinenes and 4 |
| | | additional unidentified |
| | | sesquiterpenes |
| AG2522-1 | beta-myrcene and | caryophyllene 9 epi, |
| | linalool | aromadendrene, |
| | | bicyclogermacrene and 10 |
| | | additional unidentified |
| | | sesquiterpenes |
| AG3403-2 | beta-myrcene and geraniol | |
| AG3908-1 | eucalyptol, gamma | |
| | terpinene, alpha thujene | |
| | and 6 additional monoterpenes | |
| AG046-1 | | bisabolene |

[0502] Accordingly, the biochemical function and terpene products of individual gene sequences are identified and the particular sequence is linked to its volatile terpene product. Thus, the gene sequences of the 45 members of the Cannabis terpene synthase family described are attributed to particular terpene compounds.

[0503] Accordingly, the differences in gene expression of particular genes among the different varieties, combined with differences in gene sequences due to variety-specific allelic polymorphisms for individual genes, allow for the selection of genetically defined varieties based on their terpene synthase sequences and gene expression. These are used for the breeding of novel cannabis varieties with desirable volatile composition, using a marker-assisted genetic breeding program based on the variety-specific gene sequences.

### Example 3

### Breeding Cannabis Varieties

[0504] Cannabis varieties expressing desired volatile terpene components are bred with cannabis varieties for generation of new cannabis varieties comprising a desirable volatile composition. Breeding is carried out via backcrossing, marker assisted breeding, selfing, or via genetic transformation (e.g. via genetic transfer of chromosomal segments from select varieties chosen on the basis of their TPS gene expression pattern).

### Example 4

### Identifying Transporters in Cannabis sativa

[0505] Twelve full length ATP-binding cassette transporter (ABC) and Peptide Transporter (PTR) gene families were identified (see Table 7, below).

TABLE 7
Amino acid sequences of the 12 ABC +
PTR Transporter identified gene products

| Transporter Gene (according | Amino Acid | Nucleic Acid |
|---|---|---|
| to chromosomal position) | Sequence | Sequence |
| T-790-1 | SEQ ID NO: 46 | SEQ ID NO: 103 |
| T-792-1 | SEQ ID NO: 47 | SEQ ID NO: 104 |
| T-792-2 | SEQ ID NO: 48 | SEQ ID NO: 105 |
| T-795-1 | SEQ ID NO: 49 | SEQ ID NO: 106 |
| T-796-1 | SEQ ID NO: 50 | SEQ ID NO: 107 |
| T-796-2 | SEQ ID NO: 51 | SEQ ID NO: 108 |
| T-796-3 | SEQ ID NO: 52 | SEQ ID NO: 109 |
| T-AG0100-1 | SEQ ID NO: 53 | SEQ ID NO: 110 |
| T-AG0100-2 | SEQ ID NO: 54 | SEQ ID NO: 111 |
| T-AG2575-1 | SEQ ID NO: 55 | SEQ ID NO: 112 |
| T-AG2575-2 | SEQ ID NO: 56 | SEQ ID NO: 113 |
| T-AG9876-1 | SEQ ID NO: 57 | SEQ ID NO: 114 |

[0506] The ABC+PTR Transporter genes were named following their chromosomal position in the same manner as the Terpene Synthase genes. The Transporter genes were treated and named as a distinct group, and their designated name contains the letter “T” at the beginning of their name (e.g. T-790-1) to differentiate them from the Terpene Synthase genes (e.g. 790-1).

TABLE 8
Genomic coordinates of 12 cannabis
(ABC + PTR) Transporter genes

| Gene | | Start bp | End bp | |
|---|---|---|---|---|
| (new | Chromosome | (genome | (genome | Transporter |
| name) | (contig) | start bp) | end bp) | family |
| T-790-1 | CM010790.1 | 78188811 | 78198320 | ABC-B |
| T-792-1 | CM010792.1 | 10359393 | 10366510 | ABC-G |
| T-792-2 | CM010792.2 | 27429206 | 27441008 | ABC-G |
| T-795-1 | CM010795.2 | 33651495 | 33657701 | ABC-G |
| T-796-1 | CM010796.2 | 2290332 | 2296582 | ABC-G |
| T-796-2 | CM010796.2 | 2297673 | 2303864 | ABC-G |
| T-796-3 | CM010796.2 | 2324151 | 2331474 | ABC-G |
| T-AG0100-1 | AGQN03000100.1 | 177381 | 180571 | PTR/NRT |
| T-AG0100-2 | AGQN03000100.1 | 187363 | 191535 | PTR/NRT |
| T-AG2575-1 | AGQN03002575.1 | 43585 | 54754 | ABC-G |
| T-AG2575-2 | AGQN03002575.1 | 59076 | 67714 | ABC-G |
| T-AG9876-1 | AGQN03009876.1 | 5231 | 10059 | ABC-G |

TABLE 9
Homologs of each of the ABC + PTR Transporter genes

| Gene name | Closest homolog | Closest organism | % identity |
|---|---|---|---|
| T-790-1 | PON87450.1 | Trema orientale | 93 |
| T-792-1 | PON89636.1 | Trema orientale | 76 |
| T-792-2 | PON89636.1 | Trema orientale | 73 |
| T-795-1 | PON89425.1 | Trema orientale | 82 |
| T-796-1 | PON89430.1 | Trema orientale | 81 |
| T-796-2 | PON89425.1 | Trema orientale | 85 |
| T-796-3 | PON89425.1 | Trema orientale | 83 |
| T-AG0100-1 | PON99177.1 | Trema orientale | 79 |
| T-AG0100-2 | PON99176.1 | Trema orientale | 81 |
| T-AG2575-1 | PON66387.1 | Parasponia andersonii | 78 |
| T-AG2575-2 | PON89425.1 | Trema orientale | 78 |
| T-AG9876-1 | PON89425.1 | Trema orientale | 78 |

TABLE 10
Gene expression of 12 Cannabis ABC + PTR Transporter genes in inflorescences of 4 varieties
and the enriched trichome fraction of Var CS14 (Numbers indicate FPKM values)

| | Var CS11- | Var CS12- | Var CS13- | Var CS14- | | |
|---|---|---|---|---|---|---|
| | whole | whole | whole | whole | trichome | fold |
| Gene name | inflorescence | inflorescence | inflorescence | inflorescence | Var CS14 | enrichment |
| T-790-1 | 21 | 32 | 36 | 23 | 185 | 8.0 |
| T-792-1 | 3.6 | 25 | 9.4 | 5.6 | 69 | 12.3 |
| T-792-2 | 9 | 11 | 10 | 3.9 | 22 | 5.6 |
| T-795-1 | 8.5 | 5.9 | 3.9 | 21 | 3 | 0.2 |
| T-796-1 | 76 | 23 | 8.5 | 18 | 7 | 0.4 |
| T-796-2 | 74 | 22 | 9.5 | 21 | 6 | 0.3 |
| T-796-3 | 4.5 | 3.9 | 4 | 3.2 | 10 | 3.2 |
| T-AG0100-1 | 13 | 13 | 39 | 6.7 | 77 | 11.5 |
| T-AG0100-2 | 2.5 | 2.8 | 3.6 | 3 | 3 | 1.2 |
| T-AG2575-1 | 9.8 | 12 | 14 | 5.8 | 57 | 9.7 |
| T-AG2575-2 | 14 | 26 | 17 | 15 | 91 | 6.0 |
| T-AG9876-1 | 11 | 11 | 19 | 5.3 | 61 | 11.4 |

### Example 5

### Evaluation of the Cannabis ABC and PTR Transporter's Toxicity Reduction Effect of Terpenes and Cannabinoids in Yeast and Tobacco Cells

[0507] To functionally identify the Cannabis ABC and PTR Transporters, the present inventors took advantage of the toxicity of terpenes to yeast cells and cannabinoids to tobacco BY-2 cells [Demissie Z. A. el al., Planta (2018) 10.1007/s00425-018-3064-x; Sirikantaramas S. el al., Plant Cell Physiol. (2005) 46:1578-1582]. The rescue from terpene and cannabinoid toxicity in cell culture was assessed by analyzing the growth inhibition effect of various monoterpenes or cannabinoids on a matrix of yeast cells harboring an empty vector, vectors expressing ABC or PTR Transporters or wild-type cells. The Terpene and Cannabinoid toxic effect was assessed based on a procedure consisting plate assays as previously described [Demissie Z. A. et al., (2018), supra]. The toxic effect and cell death activity of terpenes and cannabinoids in tobacco was assessed on cell cultures and live plants as previously described [Sirikantaramas S. et al., Plant Cell Physiol. (2005) 46:1578-1582]. Alternatively, as described in the example, effects were assessed based on the growth kinetics of the yeast cells following incubation with the cannabinoid CBD.

[0508] FIGS. 1A-B show the effect of 0.5 mM CBD on growth dynamics of the yeast cells expressing the transporter genes. The figures indicate the time course of yeast growth as expressed in cell turbidity (A600) during the 12 hour period following the initiation of experiment (as described in the ‘general materials and experimental section’ above). It can clearly be seen that the NRT transporter (T-AG0100-1) shows reduced growth inhibition (FIG. 1B), as compared to the control yeast harboring the empty vector (FIG. 1A). FIG. 2 expands these results to members of the B and G family of ABC transporters and shows that from 7-12 hours after initiation of the experiment the control yeast was inhibited by CBD to 42% of its growth without CBD, in comparison to the T-790-1 (ABC-B), T-AG2575-1 (ABC-G), T-AG2575-2 (ABC-G) and T-792-1 (ABC-G), as well as the NRT transporter T-AG0100-1, all of which showed reduced inhibition of growth in response to CBD.

### Example 6

### Evaluation of the Cannabis Transporter on CBD and Terpene Uptake in Yeast and Tobacco Cells

[0509] FIG. 3A shows the effect of the ABC transporter genes on uptake of CBD into yeast cells. In this experiment, the transporters T790-1 and T-AG2575-1 showed reduced net uptake of CBD, as compared to the control yeast, indicating a transport function. FIG. 3B further strengthens the results that T-792-1 leads to an increase in CBD levels, compared to the control.

[0510] FIG. 4 shows the reduced net uptake of CBD into yeast cells by the NRT transporter AG0100-1 (NRT-yeast cells) as compared to the control, empty plasmid yeast cells following a three hour incubation, again indicating transport function. Results are averages and s.d. of 3 replications.

[0511] The effect of the NRT transporter gene on CBD uptake in tobacco BY-2 cells is shown in FIG. 5 which shows a strong effect of the NRT gene on the uptake of CBD. A concomitant effect of the NRT transporter on BY-2 cell viability, as indicated by fluorescence using the FDA fluorescence indicator is shown in FIGS. 6A-B.

[0512] The effect of the T-790-1 ABC B family transporter gene on CBD uptake in tobacco BY-2 cells is shown in FIG. 7 which shows a strong effect of the T-790-1 gene on the uptake of CBD.

[0513] FIGS. 8A-C show the effect of the transporters on terpene uptake by yeast cells. The control yeast are represented as 100% and the effect of each transporter is expressed as percent of control. These results show that the Cannabis transporters reported here have an activity in transporting and modifying the internal yeast levels of the various terpenes.

[0514] Although the invention has been described in conjunction with specific embodiments thereof, it is evident that many alternatives, modifications and variations will be apparent to those skilled in the art. Accordingly, it is intended to embrace all such alternatives, modifications and variations that fall within the spirit and broad scope of the appended claims.

[0515] All publications, patents and patent applications mentioned in this specification are herein incorporated in their entirety by into the specification, to the same extent as if each individual publication, patent or patent application was specifically and individually indicated to be incorporated herein by reference.

[0516] In addition, citation or identification of any reference in this application shall not be construed as an admission that such reference is available as prior art to the present invention. To the extent that section headings are used, they should not be construed as necessarily limiting. In addition, any priority document(s) of this application is/are hereby incorporated herein by reference in its/their entirety.

The application's sequence listing, which the Patent Office published only in electronic form, follows.

SEQUENCE LISTING (130 sequences)

SEQ ID NO: 1 - protein, 622 aa, Artificial sequence
  Terpene Synthase Gene Amino acid sequence of the 45 identified gene products
MACITVQHHFSSLLPNICSSTNFGVFYRPKIYTNYNIINGGTKSRLSSACYPIICAVVNSSNAIIDRRSANFEPSIWSFDYIQSLTSQYKEESYTGRVKELEIDVKKMLIEMENSLIQLELIDTLQRLGVSYRFEDEINTILKEKYINMINNPNYNNLYVTALEFRLLRQHGYAVPQEIFNHFKDEIGKIKTNMISDDIMEVLALYEASFYEKKGESILEEVRIFTTQYLKNYIIMISQERKLMIDNDNDYDYDIEIVNHALELPLHWRTTRTEAKWFIDAYEKKQDMNPILLEFAKLDFNMIQSTHHDDLKHIFRWWRHTKLGEKLNFARDRLMECFLWKVGIRFEPKFSYFRKTTAKLFELITVIDDIYDVYGTLDELELFTKAIERWDMEMINELPEYMKMPYIVLHNTINEMVFEVLRDQHISINIQYLKKTWVDMCRGFLQEAKWYYSGYTPTLEEYIKNGWISVGAPVLIVHAYFSHANYNHTVTSSKEIFECFEHGYYPAIIRHSAIILRLTNDLATSSEELKRGDAPTSIQCYMQEKKVSEEKAREHIKFLISEIWKEMNNDVGLYPISLIEDATNFAKMGFFMYQHGDGHSSQDNQSKQKISSLIIEPIPLYT

SEQ ID NO: 2 - protein, 618 aa, Artificial sequence
  Terpene Synthase Gene Amino acid sequence of the 45 identified gene products
MHCITLKHQISPLLPNICSTTNFGVFFRPKLYTNYNIINGGTKSRLSSACYPIQCAVVNSSNAIIDRRSANFEPSIWSFDYIQSLTSQYKGEPYTSRVKKLERDVKKILVEMENSLAQLELIDTLQRLGISYRFENEINSILNKKYLNINNPNYNLYAIALQFRLLRQHGYAVPQEIFNQLKDEIEKIKKHINGNDIMGILALYEASFYEKKDESILKEARIFTTKCLKNYTIMISEQKKLMIDNDYDYDIEVVNHALELPLHRRTTRTEAKWFIDAYAKKQDMNPMLLELAKLDFNIVQSTHHEDLKHIFRWWRHTKLGEKLNFARDRLMECFLWNIGIRFESKFSYFRTKTAKLFELVTFIDDIYDVYGTLDELELFTKAVERWDVKMINELPEYMKMPYLVLHNTINDMVFEVLRDQGISINIQYLKKTWVDMCKSFLQEAKWYYSGYTPTMEEYIENGWISVGAPVILVHAYFFHANNNRTITNTKEIFECLEYGYYPAIIRHSAIILRFTNDLATSSEELKRGDAPTSIQCYMQEKNVSEEEAREHIKFLINEAWKEMNNDVGLYPISLTEDATNFAKMGFFIYQHGDGHSSQDNQSKQKISSLIIEPIPLYT

SEQ ID NO: 3 - protein, 635 aa, Artificial sequence
  Terpene Synthase Gene Amino acid sequence of the 45 identified gene products
MQCMAFHQFAPSSSLPIWSRINNRLTPKTSIITSISKPKSNLKSRSRSSTCYPIQCTVVDNPSSTITNNSDRRSANYGPPIWSFDFIQSLPIQYKGESYTRQLNKLKKEVTRMVLGLEINSLALLELIDTLQRLGISYHFKNEINTILKKKYTDNYINNNIIITNPNYNNLYAIALEFRLLRQHGYTVPQEIFNAFKDKRGKFKTCLSDDIMGVLCLYEASFYAMKHENILEEARIFSTKCLKKYMEKMENEEEKKILLLDDNNINSNLLLINHAFELPLHWRITRSEARWFIDEIYEKKQDMNSTLFEFAKLDFNIVQSTHQEDLQHLSRWWRDCKLGGKLNFARDRLMEAFLWDVGLKFEGEFSYFRRINARLFVLITIIDDIYDVYGTLEELELFTSAVERWDVKLINELPDYMKMPFFVLHNTINEMGFDVLVQQNFVNIEYLKKSWVDLCKCYLQEAKWYYSGYQPTLEEYTELGWLSIGASVILMHAYFCFTNPITKQDLKSLQLQHHYPNIIKQACLITRLADDLGTSSDELNRGDVPKSIQCYMYDNNATEDEAREHIKFLISETWKDMNKKDEDESCLSENFVEVCKNMARTALFIYENGDGHGSQNSLSKERISTLIITPINIPK

SEQ ID NO: 4 - protein, 623 aa, Artificial sequence
  Terpene Synthase Gene Amino acid sequence of the 45 identified gene products
MQCIAFHQFASSSSLPIWSSIDNRFTPKTSITSISKPKPKLKSKSNLKSRSRSSTCYPIQCTVVDNPSSTITNNSDRRSANYGPPIWSFDFVQSLPIQYKGESYTSRLNKLEKDVKRMLIGVENSLAQLELIDTIQRLGISYRFENEIISILKEKFTNNNNNPNPINYDLYATALQFRLLRQYGFEVPQEIFNNFKNHKTGEFKANISNDIMGALGLYEASFHGKKGESILEEARIFTTKCLKKYKLMSSSNNNNMTLISLLVNHALEMPLQWRITRSEAKWFIEEIYERKQDMNPTLLEFAKLDFNMLQSTYQEELKVLSRWWKDSKLGEKLPFVRDRLVECFLWQVGVRFEPQFSYFRIMDTKLYVLLTIIDDMHDIYGTLEELQLFTNALQRWDLKELDKLPDYMKTAFYFTYNFTNELAFDVLQEHGFVHIEYFKKLMVELCKHHLQEAKWFYSGYKPTLQEYVENGWLSVGGQVILMHAYFAFTNPVTKEALECLKDGHPNIVRHASIILRLADDLGTLSDELKRGDVPKSIQCYMHDTGASEDEAREHIKYLISESWKEMNNEDGNINSFFSNEFVQVCKNLGRASQFMYQYGDGHASQNNLSKERVLGLIITPIPM

SEQ ID NO: 5 - protein, 614 aa, Artificial sequence
  Terpene Synthase Gene Amino acid sequence of the 45 identified gene products
MFCLGVHQFSPLSLILNTTKLARASTLSSACYPIQCTMVNSTNITNNTTIFDNHIHRRSANYEPPIWSFDYIQSLSSSQYKGETCTSRLNELEANVKEILLVEMKSNSLAQLEFIDALQRLGLSYRFETEINTILNEKYSGNIIDNPNYNLYATALEFRLLRHHGYDVSQEIFNVFKDEITSKFKARTSGEDIIGVLALYEASFYGKKSESILEEARVSSIECLENYVATMTMERNKPSLLVNDYDDDNNMLLLVNHALELPLYWRITRSEARWFIDLYEKNHNMNSTLLEFAKLDYNMVQSIYQEDLKHLSRWWSHTKLGEKMDFFRDRLMECFLWTVGIACEPEKSYYRRMSGRLYVLITTIDDIYDVYGTLEELELFTNAVERWDVKAMDDLPEYMRMPFFLLHNTINEMAFDVLGHQNFLNVKFLKRTWVDFCKHQLQEAKWFHSGYKPTFEEYINNAWISVSGPIILMDAYFSLTNPVTKDAINLLELGYPPIIYHASMILRLTDDLGTSNDEMKRGDIPKSIQCYMNDTGVSEDEARDHMKFLISELWKEINNEDENMDSPFSKQFLQNCKNLARISQFIYQYGDGHASQDSLSKQRISELIINHIPS

SEQ ID NO: 6 - protein, 552 aa, Artificial sequence
  Terpene Synthase Gene Amino acid sequence of the 45 identified gene products
MSNIQVLASSQLCDKIIARPTTNFHPSIWGDRFLHYNISEQDLVCKQERVEELIQVVKKEILSSNHDQLKLIDNLQRLGLSHHFESEIEKLLEQLSIGTHHQNHHDLHDASLRFRLLRQHGFNVSSSIFEKFKDDEGNFKKSLITDVSGLLSLYEASHLSYVGESILDEALAFTTTHLKAIVANSKDHPLSHQISIALHRPLRKTIERLHARFYISIYEKDASHNKVLLELAKLDFNLLQCFHKKELSEIMRWWKEHEFVKKFPFARDRMVELYFWILNVYYEPKYSRARKLLTKVIALTSITDDTYDAYGTIDELELLTKAIQRWDINCLDKLEPEYLKTYYKVMLDSYEEFEKELKKEELYKLEYAKEEMKRIIRAYFEEARWLNEGYFPSFDEHLRVSYVSCGYILLIATSYVGMYDIVTHETLDWLSKDPKIISASTLLSRFMDDIGSRKFEQQRNHIPSTVDCYMKQYGVSEEEAIKELNKRVVTYWKEINEDFIRPTVVPFPILLRVLNFTKVADLLYKEGDDQYTNVGKVLKESIAALLIDSIPL

SEQ ID NO: 7 - protein, 551 aa, Artificial sequence
  Terpene Synthase Gene Amino acid sequence of the 45 identified gene products
MSNIQVLASSQLCDKIIARPTIKFHPSIWGDRFLHYNISEQDLVCKQERVEELIQVVKKEILSSNHDQLKLIDNLQRLGLSYHFESEIEKLLELLSIGTHHQNNNLHDVSLRFRLLRQSGFKVSSSIFEKFKDEKGNFKESLITDVPGLLSLYEASHLSYVGESILDEALAFTTTHLKAIVANSKNHPLSHQISIALERPLRKTIERLHARFYISIYEKDASHNKLLLELAKLDFNVLQCFHKKELSEIMRWWKEHEFVKKFPFARDRMVELYFWILGVYYEPKYSRARKLLTKVIALTSITDDTYDAYGTIDELELLTKAIQRWDINCMDKLEPEYLKTYYKVMLDSYEEFEKELKKEELYKLEYAKEEMKRTIGGYFEEARWLNEGYFPSFDEHLRVSYVSSANVLLIATSFVGMHDIVTHETLDWLSKHPNIVSASTLLSRFMDDIGSRKFEQERNHIPSTVDCYMKQYGVSEEEAIKELNKRVITHWKEINEDFIRPTVVPFPILVRVLNFTKVIDLFYKEGDDQYTRVGKALKESIDALLIDSIPL

SEQ ID NO: 8 - protein, 556 aa, Artificial sequence
  Terpene Synthase Gene Amino acid sequence of the 45 identified gene products
MSYQVLASSQNDKVSKIVRPTTTYQPSIWGERFLQYSISDQDFSYKKQRVDELKEVVRREVFLECYDNVSYVLKIVDDVQRLGLSYHFENEIEKALQHIYDNTIHQNHKDEDLHDTSTRFRLLRQHGFMVSSNIFKIFKDEQGNFKECLITDILGLLSLYEASHLSYIGENILNEALAFTTTHLHQFVKNEKTHPLSNEVLLALQRPIRKSLERLHARHYISSYENKISHNKTLLELAKLDFNLLQCLHRKELSQISRWWKEIDFVHKLPFARDRIVELYLWLLGVFHEPELSLARIISTKVIALASVADDIYDAYGTFEELELLTESINRWDLNCADQLRPECLQTFYKVLLNCYEEFESELGKEESYKVYYAREAMKRLLGAYFSEARWLHEGYFPSFDEHLKVSLISCGYTMMIVTSLIGMKDCVTKQDFEWLSKDPKIMRDCNILCRFMDDIVSHKFEQQRDHSPSTVESYMRQYGVSEQEACDELRKQVINSWKEINKAFLRPSNVPYPVLSLVLNFSRVMDLLYKDGDGYTHIGKETKNSVVALLIDQIP

SEQ ID NO: 9 - protein, 562 aa, Artificial sequence
  Terpene Synthase Gene Amino acid sequence of the 45 identified gene products
MFTQILVSSSSNDNPNIIVRPTKKFHPNIWGERFLHYNISQQDLYCQQQKVEKLKEVVRREIFGDYYYDAWKNQLKIIDVVERLGLSYHFETEIENKLQCIYNKTNIDDEDLHHVSIRFRLLRQHGFRISSDIFEKFKDEDGNFKKCLVSDTLGLLSLYEASHLSCVGENILDEALAFTTTHLNEFLVKKKEHHEDDDPLSKEISRALERPLRKTLVNLHARHFISIYEKDASHNKVLLQLAKLDFNLLQCMHKKELSEVSRWWKESDFVHKFPFARDRIVELYLWILGVYYEPQYCLARNILVKIIALASIADDIYDAYGTLEELEILTHAIERWDINCVDKLNQEYMQTFYKDCLNCYEEFEQLLEKEETYRVHYAKEAFKGLVQSHLNEARCLHRGYIPSFEEYLKFALGNCGYYMLILSSLVGMKTNIVTKEVFEWLSKDRKIIRASVTICRLMDDIAEHKFEEDDYEEHSAVECYMIEHGVCEEEAYDELNKLIMNAWKEINEEFLKPTKVASPILLRALNFSRVMDLIFKFGDGYTHVGKITKDIVAALLIHPISL

SEQ ID NO: 10 - protein, 562 aa, Artificial sequence
  Terpene Synthase Gene Amino acid sequence of the 45 identified gene products
MSTQILASSSSNDNPNKIVRPTKSFHPHIWGERFLHYNISQQDLYCQQQKVEELKEVIRREIFGESCYDNVSYVLKIIDVVERLGLSYHFESEIENKLQCIYNKTNIDDEDLHHVSLRFRLLRQHGFRISSDIFEKFKDEDGNFKKCLVSDTLGLLSLYEATHLSCVGENILDEALAFTTTHLTEFLARKKEYHDDDDPLSKEISRALERPLRKTLVNLHARHFISIYEKDDSHNKVLLQLAKLDFNLLQCMHKKELSEVSRWWKESDFVHKFPFARDRIVELYLWILGVYYEPRYCLARNILVKIIALASIADDIYDAYGTLEELELLTHAIERWDINCVDTLNQEYMQTFYKDVLNCYEEFEQVLEKEEQYKVHYAKEAFKGLVRSHLDEARCLHRGLIPSFEEYLKFALDNCGYYMLILSSLVGMKTNIVTKDVFEWLSKDRKIIRASVTICRLMDDIAEHKFEEDDYEEHSAVECYMIEHGVCEEEAYDELNKLITNAWKEINEEFLKPTKVASPILLRALNFSRVMDLIFKFGDGYTHVGKITKDIVAALLIHPISL

SEQ ID NO: 11 - protein, 561 aa, Artificial sequence
  Terpene Synthase Gene Amino acid sequence of the 45 identified gene products
MSSSDNNNNMNRPNSIPFSPSIWKDYLMSNVSNNSLMDMKENNDDSEIVILKKEVKKKIVELDYVENPLETLEFIDSIQRLGVSYYFENQIEVVLKNICNKFHEENNDDDDLYVVALRFRLVRQQGYYMSCDVFNKFTNNEGKFEESLCNDIRGMLSLYEASQLRVHGEKILDDALIFTTNHLESAAKTSKLSSHISNQVNHALKNPIRKSLQRRQARHYMSLYHQISSHNEHLLALAILDFNLLQKLYQKELSDLTRWWKEFDYERRQSFSRERIMDCYFWTFGVFFEAETSHIRLLMSKLIALLTLVDDIYDNFGTLQELHLLTEAIQRWDMCLIDQLPEYIQPCYKEILNLYTEIGEFTKDKSYCLSYAKKGFQELVKGYFEEAKWLHQKHNPTLDEYMPIALVTAASPLLIAISFIGMPNVVTKDSMNWIFSHPQPKSVRTLSIVGRVLNDIGFYQWRERRTEKVDFSAVDCYIKKYGVEEEEAIQRLKEQVSDSWKDLNEECLYPNNMNIPMPLLMRVLDLVRMNNELYREGDGFTREAFIKDLIDSLIINPYIQQ

SEQ ID NO: 12 - protein, 567 aa, Artificial sequence
  Terpene Synthase Gene Amino acid sequence of the 45 identified gene products
MSPCEATIDEKRPNMPKFTPTIWGDYFMSSASNHHHSSLMETMENNNKESYEKIIEMKEQVKNKLLHGLHPLENPLETLEYIDDIQRLGLSYYFENEIEQNLEQFHNNYQNLIDFGDNNLYADALCFRLLRQQGYNIACDIFDKYKNEKGKFKESISSDIRGMLNLYEAAQMRVHGEKILDEALIFTTTHLESSVKTCQLSSPYLDLVKHALMHPIRKSLQRREARLYISLYHQLPSHEEILLTLAKLDFNLLQKLHQKELSYITRWWKEFDYKSKHSFIKDRIVECYFWVYGVFFEAETSQIRLIITKLIAILTIIDDAYDSFGTLEELEPFTQAIERWDICAIDTLPEYMKIFYMKLLEIYNEIEQFSKERSYCPSYAKKGVQSLIRAYFKEAKWLHTKYIPTLDEYMPVGVDSAGSFMLISMVFIGMGDIVTKHSMDWIFSNPQPKIIQTMAIVGRVMNDIGYHKSERKKSSGEIVASTVECYMKQYGVTGEEAIEKLSEQVKDSWKDLNEDLLNPITIPRPLLMQVLKLVRVNHEIYREGDGFTQPTLLKNLIHSLIINPIDF

SEQ ID NO: 13 - protein, 565 aa, Artificial sequence
  Terpene Synthase Gene Amino acid sequence of the 45 identified gene products
MTLISSDEKRPNLAEFTPSIWGDYFMSCASNDDHSSLKETMENNKESYVKIIELKEQVKKKLLHGLHPLENPLETLEYIDDIQRLGLSYYFENEIEQVLKQFHNNNNNLHRDFGDNNLYADALRFRLLREQGYFIACEVFAKYKNEKGKFKESISSDIRGMLNLYEASQMRVRREEILDEALIFTTTHLQSLVETSQLSSPYLDLVKHALMHPIRKSFQRREARLYISLYRKLPSHEELLLTLAKLDFNLLQQLHQKELNYITRWWKEFDFKSKQSFSRDRIVECYIWNYGVYFEAQTSQIRLMMTKLISLLTIIDDSYDSYGTLEELRPFTEAWMLERWDISATDNLPEYMKVCYKKCLEFFNEIEEFTKENSYCASYIKKGLQCMVRAYSKEVQWLHNKYMPTFDEYYPIGLDNAGSEELISMAFCGMGDVVTKESMDWIFSQPQPKIIRTMSIVGRLMNDIGYKSDRRKLSKDVVASAVECYIKQYGVTDEEAIEKLNEQVNDSWKDLNEDLLYPIAIPRPLLMRVLNLVRVNHEMYREGDGFTQPTLLKNLIDTLIINPIH

SEQ ID NO: 14 - protein, 564 aa, Artificial sequence
  Terpene Synthase Gene Amino acid sequence of the 45 identified gene products
MTLISSDEKRPNLAEFTPSIWEDYFMSCASNDDHSSLKETMENNKESYVKIIELKEQVKKKLLHGLHPLENPLETLEYIDDIQRLGLSYYFENEIEQVLKQFHNNNNLHRDFGDNNLYADALRFRLLREQGYNIACEVFAKYKNEKGKFKESISSDIRGMLNLYEASQMRVRREEILDEALIFTTTHLQSLVETSQLSSPYLDLVKHALMHPIRKSFQRREARLYILLYHKLPSHELLLTLAKLDFNLFQQLHQKELNYITRWWKEFDFKSKQSFSRDRIVECYIWNYGVYFEAQTSQIRLMMTKLISLLTIIDDSYDSYGTLEELRPFTEAWMLERWDISATENLPEYMKVCYKKFLEFFNEIEEFTKENPYCASYVKKGLQCMVRAYSKEVQWLHNKYMPTFDEYYPIGLDNAGSDELISMAFCGMKDVVTKESMDWIFSQPQPKIIRTMSIVGRLMNDIGYHKSDRRKLSKDVVASAVECYIKQYGVTDEEAIKKLNEQVNDSWKDLNEDLLYPIAIPRPLLMRVLNLVRVNHEMYREGDGFTQPTLLKNLIDTLIINPIH

SEQ ID NO: 15 - protein, 556 aa, Artificial sequence
  Terpene Synthase Gene Amino acid sequence of the 45 identified gene products
MSNQVLASSQLGEKILARPTTNFHPSIWGDRFLHYNISEQDSVCKQQRVEELIQVVRKEILSSNHDQLKLIDNLQRLGLSYHFESEIEKLLEQLSTTHHQNHHDLHDASLCFRLLRQHGFNVSSSIFEKFKDDEGNFKRSLITDVSGLLSLYEASHLSYVGESILDEALAFTTTHLKAIVANNKDHPLSHQISIALHRPLRKTIERLHARFYISIYEKDASHNKILLELAKLDFNLLQCFHKKELSEIMRWWKEHDFANKFPFARDRMVELYFWILGVYFEPKYSRARKLLAKVIAFASIIDDIYDAYGTIDELELLTKAIERWDISCIDKLEPEYVKTYYKAMLESYEEFEKVELKNEELYKLQYAKQEMKRLIESHFEEAKWLNQRYFPSFDEHMRVSYVSCGNTMLISKDHNFVGMDNDIVTIETLQWLSNDPKIVKASTLLSRFMDDIGSRKFEQERNHIPSSVECYIKQYEVSEEDALEELNKRVENHWKEINQDFIRPTIVPFPILVRVLNFTRVMDLIYKEGDDQYTNVTNVGKVKESISALLIDPIPL

SEQ ID NO: 16 - protein, 570 aa, Artificial sequence
  Terpene Synthase Gene Amino acid sequence of the 45 identified gene products
MSNIQHQILLSLSQNNNNNNEKIIIHKNVVVRPTTKFHPSIWGDRFLHYNASQQDLECKEQRVKELVEVVRKEILSSNHDQLKLIDSVQRLGLSHHFETEIEQMLERLYQYYYHYSTTKHDHHLHHHSIMFRLFKTTWFKVSSSIFEKFKDEKGNFKKSLITDVSGLLSLYEASYLSYVGESILDEALAFTTTHLKAIVANSKDHPLSHQISKALERPLRKTIERLHARFYISIYEKDASHNKVLLELAKLDFNLLQCFHKMELSEIMRWWKKHDFANKFPFARDRMVELYFWMLGIYYEPKYSRARKLTTKISALISITDDIYDAYGTIDELELLTQAIDRWDIDFIDKLEPEYLKTYYKAMLTSYEEFEKEFTKEELYKHQYAKEEMKKLIRAYLEEARWLNDGYLPSFDEHLKVSYVSCAYTTLIATSYVGMHDIVTHETLNWLSKDPKIVSASTLLARFMDDIGSRKFEQERNHIPSTVECYMKQYGVSEKEAIEELNKRVVNYWKEINEDFIRPTVMPFPILVRVLNVTKVLDLLYKNGDDQYTHVGKVFKESIAALLIDPIPVL

SEQ ID NO: 17 - protein, 571 aa, Artificial sequence
  Terpene Synthase Gene Amino acid sequence of the 45 identified gene products
MSSQVLASSQKNDKTQNIIRPTTKFHPPIWGDRFLHYNISEQELEYKEGQVEELKEVVRKEIFHGNNKRNIINVSKQLKLIDDVERLGLSYHFESEIEKKLQHIYEITTNNIDHQDQHYYYSNHDEDLHDVSIRFRLLRQHGFNISSNIFEKFKDESGKFKESLKSDIEGMLSLYEASYLSYVEENILDEALAFTTTNLKLVANKKEHPLSHEISLALYRPLRKTLVRLYARHYISIYEKQPSHNKVLLQFAKLDFNLLQSLHKKELSEISRWWKELDLANKLPFARNRIVELYLWILGVFHEPQFSLARKILIKAISMASVADDIYDAYGTFEELELLTEAILRWDISFIDKLSPDYLKTYYKVFLNSYEECEKDLKKEERYKLHYAKESMKKLIQAYFHEAQWLNQGHFPSFDEHLKVSFVSSGYPMLIETSFVGMQDVKTNQVFEWLSTQPKIFRACTIISRFMDDLVSRKFEQERNHVPSTVDCYMKQYGVSEQEACDELNKQVVNLWKEINQEFLRPTSMPSSILVRILNFTKVLDIIYKEGDGYTHVGKLVKDSVAALLIDPIPL

SEQ ID NO: 18 - protein, 571 aa, Artificial sequence
  Terpene Synthase Gene Amino acid sequence of the 45 identified gene products
MITGVISSSTTIFKEQPEAIVRRSGNYKPTLWDAHFFKSLQVIYTEESYGKRINELKEDVRRILEKEAENPLVKLEQINDLSRLGISYHFEDQIKTILNLTFNNNNALWKKDNLYATALHFKLLRQYGFNPVSSEVFNAFKDQKKEFKESLSKDVKGMVCLYEASFYSFRGEPILDEARDFTTKHLKQYLMTRQCQTKSVDHDDDHDLVKLVEHALDLPLHWRLPRLEARWFIDMYAERNYDMNPTFLDFAKLDYNFVQSAYQKELKYISRWWSGSRLTERLPFARDRVVEIFYSAVALKYEAEFGFVRTVMTKIGLLLTLMDDIYDVYGTLDELQLFLGAIERWNINELDQLPDYMKILFVAFYNNVNEISYYVLKENGIHIIKYLKKALGDLCKCYMEEAKWFHSGHIPSLEEFIENGWKSITIPLCLIYHYCLITTSITEQDMEHLLQYPTILRVSGTVFRFIDDLGTSSDELERGDNPSSIQCYMREKGVSENESREHIWNLISEGWKEINEVKASNSPYSQVFIESAIDFVRGAMEMYHKGDGFGTNQDRYLKTKVVNMFFDPIPI

SEQ ID NO: 19 - protein, 572 aa, Artificial sequence
  Terpene Synthase Gene Amino acid sequence of the 45 identified gene products
MITGVISSSSTPIFKDQPAAIVRRSGNYKPTLWDAHFFNSLQVIYTEESYGKRINELKEDVRRILEKEAENPLVKLEQINDLSRLGISYHFENQIKTILNLTFNNNNALWKKDNLYATALHFKLLRQYGFSPVSSEVFNVFKDEKNEFKENLSKDVKGMVCLYEASFYSFRGEPILDEARDFTTKHLKQYLMTRQCQTKSVDHDDDDDLVKLVEHALDLPLHWRLPRLEARWFIDMYAERNYDMNPTFLDFAKLDYNFVQSAYQKELKYISRWWSGSRLTERLPFARDRVVEIFYSAVALKYEAEFGFVRTVMTKIGLLLTLMDDIYDVYGTLDELQLFLEAIERWNINELDQLPDYMKILFVAFYNNVNEISYYVLKENGIHTIKYLKKALGDLCKCYMEEAKWFHSGHIPSLEEFIENGWKSITIPLCLIYHYCLITTSITEQDMEHLLQYPTILRVSGTVFRFIDDLGTSSDELERGDNPSSIQCYMREKGVSENESREHIWNLISEGWKEINEVKASTSPYSQVFIESAIDFVRGAMEMYHKGDGFGTNQDRYLKTKVVNMFFDPIPI

SEQ ID NO: 20 - protein, 574 aa, Artificial sequence
  Terpene Synthase Gene Amino acid sequence of the 45 identified gene products
MITGVISSSSTPIFKDQPAAIVRRSGNYKPTLWDAHFFQSLQVIYTEESYGKRINELKEDVRRLLEKERENPLVKLEHINDLSRLGISYHFEDQIKTILNLTFNNNNALWKKDNLYATALHFKLLRQYGFSHVSSEIFNAFKNEQKEFKESLSKDVKGMVCLYEASFYSFRGEPILDEARDFTTKHLKQYLMTRQSQFTRVDHHDDDDHDLVKLVKHALDLPLHWRLPRLEARWFIDMYAERNYDMNPTFLDFAKLDYNFVQSAYQKELKYISRWWSGSRLTERLPFARDRVVEIFYSAVALKYEAEFGFVRTVMTKIGLLLTLMDDIYDVYGTLDELQLFLEAIERWNINELDQLPDYMKILFVAFYNNVNEISYYVLKENGIHTIKYLKKALGDLCKCYMEEAKWFHSGHIPSLEEFIENGWNSITIPLCLIYHYCLITTSITEQDMEHLLQYPTILRVSGTVFRFIDDLGTSSDELERGDNPSSIQCYMREKGVSENESREHIWNLISEGWKEINEVKASNSPYSQVFIESTIDFVRGAMEMYHKGDGFGTNQDRYLKTKVVNMFFDPIPI

SEQ ID NO: 21 - protein, 551 aa, Artificial sequence
  Terpene Synthase Gene Amino acid sequence of the 45 identified gene products
MASPFLYVPSKHGNGLQSFTDPFYMEYTRNIREMKNVMNSIILADDDYRERSIEALNLVNAVLRVGIDYHVQDEIKSILEREHIIFSDHISNQYFNNINQDHLYEVSLRFRLLRQGGYDVSPDVFNELMKDKKGNFNVLVEEDREGLRELFEASQVRIEGEEVLEEAGVFSGEHLKEWANLHRHTSEARSIQLTLDQPCHKSLARVTSPNFLDSFSANTTTRDQGWTWMTLLNKLVTMDFKIVQSIHQREIVQVSKWWKELGLAEELKFARDQPLKWYLWTVASLPDPSLSEERIELTKPISLVYIIDDIFDVYGTLDELTLFTDAVNNWEIKEQLPDYLKICFKALDDITNKISYVVYRKHGWNPIDSLRKSWGKLCNAFLLEAEWFGCGKLPNEEEYLKNAIVSSGVHVVLVHMFFLLGEGISMEAVNLLDNIPGLVSSTAAILRLWDDLGSAKDENQNGHDGSYVECYMKRHKECSMGEAREQVIRMIKNEWERLNKECFSSKHFPMCFRKGCLNAARMVPVMYDYDDHHRLPGLQNYINSLLSHQTI

SEQ ID NO: 22 - protein, 553 aa, Artificial sequence
  Terpene Synthase Gene Amino acid sequence of the 45 identified gene products
MALSIMSSYASFRPFKPSSSLSSSQNIIRNFDENSKYHIRSNGDLTPQKDLDKYRDVLRKADPFDEGLKMIDAIQRLGIDYIFEEEIDKIIQSQSAYKFFREFEHDHHHQDLYDVALRFRLLRQHGLFVPADIFNKYKDNNNGCFDTRLREDIKGLLSLYEASHLCIEGENILDEAALFSAQHLEASMTRLHRYDQYQAKFVATTLQNPTHKSLSKFTAKDLFGVYPSENGYINLFQQLAKVEFNRVQSLHRMEIDQVTRWWRDIGLAKELTFARDQPVKWYIWSMACLTDPTLSKQRVALTKSISFIYVIDDIFDMYSSLDELILFTQAVSSWEYSAIQKLPDSMKTCFRALDNMINESSHTIYQKRGWSPLHSLRKTWASLCEAFLVEAKWFASRHVPKAKEYLENGVVSSGVHVVLVHIFVLLDETSLTQKTLDFVENMPSIITSTASILRLWDDFGSAKDENQEGHDGSYVECYMKELGGSVEDAREEMMEKISDAWKCLNKECILRNPAFPPPFLKASLNLARLVPLMYNYDHNQRLPHLEEHIKSLL

SEQ ID NO: 23 - protein, 591 aa, Artificial sequence
  Terpene Synthase Gene Amino acid sequence of the 45 identified gene products
MDTQRKLQAEQLSCPTKSHELIFDHKSDHQRRSANYTPTIWKYDFLESLNNKYDSEEYKKRSEKLIEDVRHNIVETKDLKGMLELINTIRKLSLTYHFEDEVKKVLDKISSSNYYYNNKDIKDPRLVGDDLYLAALYFRLLRLHGYQVSQDIFVGYNSVDYKKGGGTHNITSTEVKVMIELLEASHVAFECEDTLTEAKALMEENLKIAFPDNCNKYIPKHEVVHALELPSHWRVQWFDVKWQIEAYRQHGDPDTNTTTTTSLLVDLAKLNFNIIQATLQKDLRELSSWWKNVGLSEKLEFARDRLVESFMCTVGLAFQPEYKSLRKCLTKVVNFILIVDDVYDVYGSLEELRHFTNAVNRWDVRETEELPDCMKICFQALYHTTCEIASEIETKNGCKLVLPNLKGAWTDFCKSLLMEAEWYHKGYIPSLEEYLSNAWISSSGPLLLLHSYLAMPNQTNTASSLDISKDLVYNISLIIRLCNDLGTSAAEQERGDAASSIVCYMQETKSSEEEARKHIREMIRKTWKKINKTCFSTCGSSSLSLSFIDIALNTARVAHSLYQSGDAFSAQHTDYKTHILSLLVHPLIPNK

SEQ ID NO: 24 - protein, 570 aa, Artificial sequence
  Terpene Synthase Gene Amino acid sequence of the 45 identified gene products
MAALVSSNIHANSSSQKNGSTGSDTIRRSANFHPSIWGDHFLKYTHQSLEVDDNTKQEVEKLKEEVRGMLTAAPSINSSQKLQLIDTIQRLGVAYHFESEISDILGKMKKINPHTELDNSTLHTVSLWFRLLRQQGYNISNIFEKFTNKKGKLDDSVSSDVEGMLSLYEASHMRIHGEPILEEAVVFTTTHLVEASKEKSQCSLFLAAQVNHALRQPILKGLPRVEIQRFISLYHHDPNHSHLLLRFAKLDFNVLQKLHQKELHEISNRWWKDLDFASKLPFARDRLVEGYIWPVGVYFEPKYSAARVILTKVIGVTTMIDDIYDVYGTLEELELFTDAIEKWDISCSDQLPDYMKYCYEALLKLYDEIEEELAMQGRTYRMAYAKETMKKLAQSYYVEAQWFHKKYTPTLQEYMEVALVSSTYYMLTATSFLGMGEEVSAEVFHWLMNSPKIVTASAVVCRLMDDVVSHKFEQDRGHVDSSVECYMKQYNVREEEACKELKKQVLDAWKEMNEECMEPRDVPMSVLMRVVNLGRVIDAVYKDGDGYTHAGGIMKTFVKSLFIQTLPSSF

SEQ ID NO: 25 - protein, 565 aa, Artificial sequence
  Terpene Synthase Gene Amino acid sequence of the 45 identified gene products
MFTQILASSSSNDNPNIIVRPTKKFHPNIWGERFLHYNISQQDLYCQQQKVEELKEVVRREIFGDYYYDAWKNQLKLIDVVERLGLSYHFETEIENKLQCIYNKTNIDDEDLHHVSIRFRLLRNGFRISSDIFEKFKDEDGNFKKCLVSDTLGLLSLYEASHLSCVGENILDEALAFTTTHLNEFLAKKKEHHEDDDPLSKEISRALERPLRKTLVNLHARHFISIYEKDASHNKVLLQLAKLDFNLLQCMHKKELSEVSRWWKESDFVHKFPFARDRIVELYLWILGVYYEPQYCLARNILVKIIALASIADDIYDAYGTLEELEFLTHAIERWDINCVDKLNQEYMQTFYKDVLNCYEEFEQLLEKEETYRVHYAKEAFKGLVRSHLDEARCLHRGLIPSFEEYLKFALDNCGYYMLILSSLVGMKTNIVTKEVFEWLSKDRKIIRASVTICRLMDDIAEHKFEEDDYEEHSAVECYMIEHGVCEEEAYDELNKLIMNAWKEINEEFVMPTEVASPILLRALNFCRVMDLIFKFGDGYTNVGKITKDIVAALLIHPIPLLVVS

SEQ ID NO: 26 - protein, 569 aa, Artificial sequence
  Terpene Synthase Gene Amino acid sequence of the 45 identified gene products
MSTQILASSSSSNENPNKIVRPTKTFHPHIWGEQFLHYNISEQDLYCQQEKVEELKEVVRREIFGESSISSSAYYDGWKNQLKIIDVVERLGLAYHFETEIENMIEQICNQTNIDDEDLHHVSDRFRLLRQHGFRISSDIFEKFKDEDGNFKKCLVSDTLGLLSLYEASHLSCVGENILDEALAFTTTHLNEFLAKKKEHHKDDDPLSKEISRALERPLRKTLVNLHARHFISIYEKDASHNKVLLQLAKLDFNLLQCMHKKELSEVSRWWKESDFVHKFPFARDRIVELYLWILGVYYEPQYCLARNILLKIIALASIADDIYDAYGTLEELELLTHAIESWDINCVDTLNQEYMQTFYKDVLNCYEEFEQVLEKEETYRVHYAKAAFKELVRSHLDEARCLHRGLIPCFEEYLKFALDNCGYYMLILSSLVGMKTNIVTKDVFEWLSKDRKIIRASVTICRLMDDIAEHKFEEDDYEEHSAVECYMIEHGVCEEEAYDELNKLIINAWKEINEEFVKPTQVASPILLRALNFSRVMDLIFKFGDGYTHVGKITKDIVAALLIHPIPL

SEQ ID NO: 27 - protein, 573 aa, Artificial sequence
  Terpene Synthase Gene Amino acid sequence of the 45 identified gene products
MSTQILASSSSSNENPNKIVRPTKTFHPHIWGEQFLHYNISEQDLYCQQQKVEELKEVVRREIFGESSISSSAYYDAWKNQLKIIDVVERLGLSYHFETEIENMIEQIYNKTNNFDLLKDEELHDVSLWVRLLRQHGFRVSSDIFKKFKDEDGNFKKCLVSDTLGLLSLYEASHLSCGGENILDEALAFTTTHLNEFLAKKKEHHDDDDPLSKEIYRALERPLRKTLVNLHTKHFISIYEKDASHNKVLLQLAKLDFNLLQSLHKKELSEISRWWKESNFVQKFPFARDRIVELYLWMLGVYYEPQYSLARNILAKIIAFSSIADDIYDAYGTFEELELLTQAIERWDINCIDTLNQEYLKTFYKDLLNCYEEFEQVLTKEETYRVHYAKEVFKELIRSYFDEARWLNSGRVPNFEEYMEFATINCGYYMLIVSSLVGMKTSIVTKDVFEWLSKDRKIIRASVIICRLMDDIAEHKFEKDKYDEDSAIESYMMQHGVCEEEAYDELNKLIINAWKEINEEFVKPTKLASPILLRVLNFSRVMDLLYKNGDGFTHVGKVTKDSVAALLIDPIFQ

SEQ ID NO: 28 - protein, 574 aa, Artificial sequence
  Terpene Synthase Gene Amino acid sequence of the 45 identified gene products
MITGLISTTTFKEQPAIVRRSGNYKPPLWDAHFIQSLQVIYTEESYGKRINELKEDVRRILEKEAENPLVKLEQINDLSRLGISYHFEDQIKAILNLTYNNNNNALWKKNNLYATALHFKLLRQYGFNPVSSEVFNAFKDEKKEFKESLSKDVKGMVCLYEASFYSFRGEPILDEARDFTTKHLKQYLMMTRQGKTISVDHDDNNDLMVKLVEHALELPVHWRMKRLEARWFIDMYAEMSHHHHMNSTFLQLAKLDFNVVQSTYQEDLKHAVRWWKTTSLGERLPFARDRIVETFLWTVGVKFEPQFRYCRKMLTKMGQLVTSMDDIFDVYGTLDELSLFQDALERWDINTIDQLPDYMKIFFLAAYNVVNEMAYDVLKQNGILIIKYLKKTWTDLCKCYMLEANWYHSGYTPSLEEYIKNGWISIAEPLLLVNLYCLITNPIKEDDMDCLLQYPTFIRISGIIVRLVDDLGTSSDELKRGDNPKSIQCYMKENGICDEKNGREHIRNLISETWKEMNEARVGESPFSQAFIETAIDFVRTAMMIYQKEQDGVGTNIDHTQKMESFPCSSLPFP

SEQ ID NO: 29 - protein, 606 aa, Artificial sequence
  Terpene Synthase Gene Amino acid sequence of the 45 identified gene products
MSSIIYSPFTSLLPLKPISSASSTATINTRLKNRFRSSILVVLRPQQRRSAKYHPTVWENKHIDSFFTPYNYELHSERLQELKQVTSTSLRTTKDPCILLKLIDSIQRLGLEYHFENEIKDAVSFIYAHNDQTTSNDLFMTALRFRILRQHGLFVGSDVFDRFRGRDGKFLDSLSSNKHGILSLYEASHLGMAEENVLEEAKSFTTKRLRYFSAGKMDNTLFGKQVKQSLEVPLYWRMPRSEARNFIDLYQMDETKSVTLLELAKLDYNLVQSVHQNELKELGRWWENLGFKKNLPFARDRVVENYLWAVGIVSEPQFSKCRIGLTKFVCILTAIDDVYDIYGSLDELELFTNAVESWDIRAIRDEFPLYLKTCYLGMLNFGNEVIDDVLQNHGLNISSYIKEEWLNLCKSYLVEARWFYNDYTPSLNEYLENSSTSVGGHAAIVHACILILDGSIPETLLDYNFNHFHSKLIYWSSLITRLSDDLGTSKDELKRGDVKKSVECYMAEKGIWEEEEAINHIKELRRNSWKMVNKEIIIGNNCLPKIMVKMCLNMARTAQFIFQHGDGIGTSTGATKHRLASLIVKPVHIDPCSKPINGLGDSHTTI

SEQ ID NO: 30 - protein, 552 aa, Artificial sequence
  Terpene Synthase Gene Amino acid sequence of the 45 identified gene products
MSNIQVLASSQLCDKIIARPTTNFHPSIWGDRFLHYNISEQDLVCKQERVEELIQVVKKEILSSNHDQLKLIDNLQRLGLSHHFESEIEKLLEQLSIGTHHQNHHDLHDASLRFRLLRQHGFNVSSSIFEKFKDDKGNFKKSLITDVSGLLSLYEASHLSYVGESILDEALAFTTTHLKAIVANSKDHPLSHQISIALHRPLRKTIERLHARFYISIYEKDASHNKVLLELAKLDFNLLQCFHKKELSEIMRWWKEHEFVKKFPFARDRMVELYFWILNVYYEPKYSRARKLLTKVIALTSITDDTYDAYGTIDELELLTKAIQRWDINCIDKLEPEYLKTYYKVMLDSYEEFEKELKKEELYKLEYAKEEMKRIIRAYFEEARWLNEGYLPRLDEHLRVSYVSCGYVMLIATSYVGMHDIVTHETLDWLSKDPKIVSASTLLSRFMDDIGSRKFEQQRNHIPSTVDCYMKQYGVSEEEAIKELNKRVVTYWKEINEDFIRPTVVPFPILLRVLNFTKVADLLYKEGDDQYTNVGKVLKESIAALLIDSIPL

SEQ ID NO: 31 - protein, 552 aa, Artificial sequence
  Terpene Synthase Gene Amino acid sequence of the 45 identified gene products
MSNIQVLASSQLSDKIIARPTTNFHPSIWGDRFLHYNVSEQDLVCKQERIEELIQVVKKEILSSNHDQLKLIDNLQRLGLSHHFESEIEKLLEQLSIGTHHQNHQDLHDASLWFRLLRQHGFNVSSSIFEKFKDDEGNFKKSLITDVSGLLSLYEASHLSYVGESILDEALAFTTTHLKAIVANSKDHPLSHQISKALERPLRMTLERLHARFYISIYEKDASHNKVLLELAKLDFNLLQCFHKKELSEIVRWWKEHEFAKKFPFARDRMVELYFWILGVYYEPKYSRARKLLTKVIALTSITDDIYDAYGTIDELQLLTKAMQRWDINCMDKLEPEYLKTYYKVMLESYEEFEKELKKEELYKLEYAKEEMKRIIGAYFEEARWLNEGYLPSFDEHLRVSYISSGYVLLIATSYVGMHDIVTHETLNWLSKDPKIVSASTLLSRFMDDIGSRKFEQERNHVLSTVECYMKQYEVSEEEAIKELNKRVANCWKEINEDFIRPTSVPFPILFRIINLTKTADFMYREGGDQYTHVGKVLKDSIAALLIDPIPY

SEQ ID NO: 32 - protein, 551 aa, Artificial sequence
  Terpene Synthase Gene Amino acid sequence of the 45 identified gene products
MSNIQVLASSQLSDKIIARPTTNFHPSIWGDRFLHYNVSEQDLVCKQERIEELIQVVKKEILSSNHDQLKLIDNLQRLGLSHHFESEIEKLLEQLSIGTHHQNHHDLHDASLCFRLLRQHGFNVSSSIFEKFKDEKGNFKGSLITDVPGLLSLYEASHLSYVGESILDEALAFTTTHLKAIVANSKDHPLSHQISIALHRPLRKTIERLHARFYISIYEKDASHNKVLLELAKLDFNLLQCFHKKELSEIMRWWKEHEFAKKFPFARDRMVEQYFWILGVYYEPKYSRARKLLTKVIALASITDDIYDAYGTIDELELLTKAMQRWDITCMDKLEPEYLKTYYKAMLDSYEEFEKELKKKIYKLEYGKEEMKRIIGAYFEEARWLSEGYLPRLDEHLRVSYVSCGYVLLIATSYVGMYDIVTHETLNWLSKDPKIVSASTLLARFMDDIGSRKFEQKRNHIPSTVDCYMKQYGVSEEEAIKELNKRVDTHWKEINEDFIRPTVVPFPILVRVLNFTKTVDLLYKEGDDQYTNVGKVLKESIAALLIDSIPL

SEQ ID NO: 33 - protein, 551 aa, Artificial sequence
  Terpene Synthase Gene Amino acid sequence of the 45 identified gene products
MSNIQVLASSQLSDKIIARPTTNFHPSIWGDRFLHYNISEQDLVCKEERIEELIQVVKKEILSSNHDQLKLIDNLQRLGLSHHFESEIEKLLEHLSTTHHQNHHDLHDASLCFRLLRQHGFNVSSSIFEKFKDEKGNFKGSLITDVPGLLSLYEASHLSYVGESILDEALAFTTTHLKAIVANSKDHPLSHQISIALHRPLRKTIERLHARFYISIYEKDASHNKVLLELAKLDFNLLQCFHKKELSEIMRWWKEHEFAKKFPFARDRMVEQYFWILGVYYEPKYSRARKLLTKVIALASITDDIYDAYGTIDELELLTKAMQRWDITCMDKLEPEYLKTYYKAMLDSYEEFEKELKKEELYKLEYAKEEMKRIIGAYFEEARWLSEGYFPSLDEHLKVSYVSCGYVLLIATSYVGMYDIVTHETLNWLSKDPKIVSASTLLARFMDDIGSRKFEQKRNHIPSTVDCYMKQYEVSEEEAIKELNKRVDTHWKEINEDFIRPTVVPFPILVRVLNFTKTVDLLYKEGDDQYTNVGKVLKESIAALLIDSIPL

SEQ ID NO: 34 - protein, 548 aa, Artificial sequence
  Terpene Synthase Gene Amino acid sequence of the 45 identified gene products
MSNIQVLASSQLSDKIIARPTTNFHPSIWGDRFLHYNVSEQDLVCKQERIEELIQVVKKEILSSNHDQLKLIDNLQRLGLSHHFESEIEKLLEQLSIGTHHQNHQDLHDASLWFRLLRQHGFNVSSNIFEKFKDDEGNFKKSLITDVSGLLNLYEASHLSYVGESILDEALAFTTTHLKAIVANSKDHPLSHQISKALERPLRMTLERLHARFYISIYEKDASHNKVLLELAKLDFNLLQCFHKKELSEIVRWWKEHEFAKKFPFARDRMVELYFWILGVYYEPKYSRARKLLTKVIALTSITDDIYDAYGTIDELQLLTKAMQRWDINCMDKLEPEYLKTYYKVMLESYEEFEKELKKEELYKLEYAKEEMKRIIGAYFEEARWLNEGYLPSFDEHLRVSYISSGYVLLIATSYVGMHDIVTHETLNWLSKDPKIVSASTLLSRFMDDIGSRKRNHVLSTVECYMKQYEVSEEEAIKELNKRVANCWKEINEDFIRPTSVPFPILFRIINLTKTADFMYREGGDQYTHVGKVLKDSIAALLIDPIPY

SEQ ID NO: 35 - protein, 552 aa, Artificial sequence
  Terpene Synthase Gene Amino acid sequence of the 45 identified gene products
MSNIQVLASSQLSDKIIARPTTNFHPSIWGDRFLHYNVSEQDLVCKQERIEELIQVVKKEILSSNHDQLKLIDNLQRLGLSHHFESEIEKLLEQLSIGTHHQNHQDLHDASLWFRLLRQHGFNVSSNIFEKFKDDEGNFKKSLITDVSGLLNLYEASHLSYVGESILDEALAFTTTHLKAIVANSKDHPLSHQISKALERPLRMTLERLHARFYISIYEKDASHNKVLLELAKLDFNLLQCFHKKELSEIVRWWKEHEFAKKFPFARDRMVELYFWILGVYYEPKYSRARKLLTKVIALTSITDDIYDAYGTIDELQLLTKAMQRWDINCMDKLEPEYLKTYYKVMLESYEEFEKELKKEELYKLEYAKEEMKRIIGAYFEEARWLNEGYLPSFDEHLRVSYISSGYVLLIATSYVGMHDIVTHETLNWLSKDPKIVSASTLLSRFMDDIGSRKFEQERNHVLSTVECYMKQYEVSEEEAIKELNKRVANCWKEINEDFIRPTSVPFPILFRIINLTKTADFMYREGGDQYTHVGKVLKDSIAALLIDPIPY

SEQ ID NO: 36 - protein, 574 aa, Artificial sequence
  Terpene Synthase Gene Amino acid sequence of the 45 identified gene products
MIITGVISSSTPIFKDQPAAIVRRSGNYKPTLWDAHFFQSLQVIYTEESYGKRINELKEDVRRILEKEAENPLVKLEQINDLSRLGISYHFEDQIKTILNLTFNNNNALWKKDNLYATALHFKLLRQYGFSPVSSEVFNAFKDEKKEFKESLSKDVKGMVCLYEASFYSFRGEPILDEARDFTTKHLKQYLMTRQSQFTRVDHHDDDDHDLVKLVEHALDLPLHWRLPRLEARWFIDMYAERNYDMNPTFLDFAKLDYNFVQSAYQKELKYISRWWSGSRLTERLPFARDRVVEIFYSAVALKYEAEFGFVRTVMTKIGLLLTLMDDIYDVYGTLDELQLFLEAIERWNINELDQLPDYMKILFVAFYNNVNEISYYVLKENGIHTIKYLKKALGDLCKCYMEEAKWFHSGHIPSLEEFIENGWKSITIPLCLIYHYCLITTSITEQDMEHLLQYPTILRVSGTVFRFIDDLGTSSDELERGDNPSSIQCYMREKGVSENESREHIWNLISEGWKEINEVKASNSPYSQVFIESAIDFVRGAMEMYHKGDGFGTNQDRYLKTKVVNMFFDPIPI

SEQ ID NO: 37 - protein, 632 aa, Artificial sequence
  Terpene Synthase Gene Amino acid sequence of the 45 identified gene products
MAAILSSIISLNSNNNNAFTRSVKSCLSSNHNNYNIIHNKTVLMSTNNNNNINNIISRRSANYQPSLWHFDYVQSLSTPFKEGAYAKRVEKVKEEVRVMVKRAKEEEKPLSQLELIDVMQRLGISYHFENEINDILKDIYNNNNVCNTNKNVYANSLEFRLLRQHGYPVSQEIFSTCKDERGNFMVSTNNIKGMLSLYEASFYLVENEDGILEETRQTTKKYLEEYIIMIMEKQQSLLDQNNNNNNDYDYDYVYELVSHALELPLHWRMLRLESRWFIDVYEKRLDMNPTLLTLAKLDFNIVQSTYQDDLKYVFRWWKNTGLGEKLKFARDRMMVNFLWTIGVSFEPHYKSLRRMATKVNALITIIDDIYDVYGTLDELELFTNVVERWDVSAMNGLPEYMKIKNCFLDLHNFINDFAFDVLKGKSLHVKKYLQKTWADLCKSYLREARWYYDGYTPRFEEYIENAWISISGPVILSHLYFFVVNPNEEDALLSTCFDGYPTIIRHSSMILRLTNDLSTSTDELKRGDVPKSIQCKMHEDGVCEEKARQHIKLLINKTWKFLNKDCINLDDDYSPMFSKPNNNINKAFIEMCLNLGRMSHCIYQYGDGHGIQDRQTKDHVLSLLIHPILLTQ

SEQ ID NO: 38 - protein, 567 aa, Artificial sequence
  Terpene Synthase Gene Amino acid sequence of the 45 identified gene products
MSSQILATSSKNYNIHKIVRPTTNYHPSIWGDRFLHYDIPKEELNYKQGQVEELEKVVRKEIFGEFLCDDWSNRLKLIDVVQRLGLSYHFESEIQNELQHIYNKISINDNNFKHETLHDASIRFRLLRQHGYRVSLDIFDKFKDENGNFKECLASDTVGLLSLYEASHLSCVGENLLDEALSFTTKHLTEFLENNKKEHPNDDPLSKEISRALERPLRKTLVNLHARYFISIYEKDASHNKVLLQLAKLDFNLLQSMHKKELSEISRWWKELDSAHNFPFARNRIVELYIWILGVYYEPQYSFARNILVKIIALSSIADDIYDSYGIFEEHKLLIEAIDRWDKNCMDKLHPEYLQKYYKILLQSFEEFEQEFEKEETYKVYYGKETFKRLLRGYFEEARWLNEGYMPSLEEHLKVSLVTSGYFMLMACSLVGMKSNNIVTKQVFEWLSKDPKIVGASASVCRYMDDVAGHKNEQERNHIPSTIECYMKQYGVSEEEACDEMNRRVVIAWKEINEEFLKPTEAASPILVRALNLARVMDLLYKNGDNYTQVGKVTKDSVAVLLIDPIP

SEQ ID NO: 39 - protein, 622 aa, Artificial sequence
  Terpene Synthase Gene Amino acid sequence of the 45 identified gene products
MACITVQHHFSSLLPNICSSTNFGVFYRPKIYTNYNIINGGTKSRLSSACYPIICAVVNSSNAIIDRRSANFEPSIWSFDYIQSLTSQYKEESYTGRVKELEIDVKKMLIEMENSLIQLKLIDTLQRLGVSYRFEDEINTILKEKYINMINNPNYNNLYVTALEFRLLRQHGYAVPQEIFNHFKDEIGKIKTNMISDDIMEVLALYEASFYEKKGESILEEVRIFTTQYLKNYIIMISQERKLMIDNDNDYDYDIEIVNHALELPLHRRTTRTEAKWFIDAYEKKQDMNPILLEFAKLDFNMIQSTHHDDLKHIFRWWRHTKLGEKLNFARDRLMECFLWKVGIRFEPKFSYFRKTTAKLFELITVIDDIYDVYGTLDELELFTKAIERWDMEMINELPEYMKMPYIVLHNTINEMVFEVLRDQHISINIQYLKKTWVDMCRGFLQEAKWYYSGYTPTLEEYIKNGWISVGAPVLIVHAYFSHANYNHTVTSSKEIFECFEHGYYPAIIRHSAIILRLTNDLATSSEELKRGDAPTSIQCYMQEKKVSEEKAREHIKFLISEIWKEMNNDVGLYPISLIEDATNFAKMGFFMYQHGDGHSSQDNQSKQKISSLIIEPIPLYT

SEQ ID NO: 40 - protein, 618 aa, Artificial sequence
  Terpene Synthase Gene Amino acid sequence of the 45 identified gene products
MHCITLKHQISPLLPNICSTTNFGVFFRPKLYTNYNIINNATKSRLSSACYPIQCAVVNSSNAIIDRRSANFEPSIWSFDYIQSLTSQYKGEPYTSRVKKLERDVKKILVEMENSLAQLELIDTLQRLGISYRFENEINSILNKKYVNINNPNYNLYAIALQFRLLRQHGYAVPQEIFNQLKDEIENIKKNINGNDIMGILALYEASFYEKKGESILKEARIFTTKCLKNYTIMISEQKKLLIDNDYDYDIEVVNHALELPLHRRTTRTEAKWFIDAYAKKQDMNPMLLELAKLNFNTVQSTHHEDLKHIFRWWRHTKLGEKLNFARDRLMECFLWNIGIRFESKFSYFRTKTAKLFELVTFIDDIYDVYGTLDELELFTKAVERWDVKMINELPEYMKMPYLVLHNTINDMVFEVLRDQEISINIQYLKKTWVDMCKSFLQEAKWYYSGYTPTLEEYIENGWISVGAPVILVHAYFFHANNNRTITNTKEIFECLEHGYYPAIIRHSAIILRFTNDLTTSSEELKRGDAPTSIQCYMQEKNVSEEEAREHIKFLINEAWKEMNNDVGLYPISLTEDATNFAKMGFFIYQHGDGHSSQDNQSKQKISSLIIEPIPLYT

SEQ ID NO: 41 - protein, 635 aa, Artificial sequence
  Terpene Synthase Gene Amino acid sequence of the 45 identified gene products
MAALVSTVSSIISLNINNNNNTFTRSVKSCLSSNHNINIIHNKTALMSTNNNNNINNIISRRSANYQPSLWHFDYVQSLSTLSKEGAYAKRVEKVKEEVRVMVKRAKEEEKPLSQLELIDVMQRLGISYHFENEINDTLKDIYNNNNVYNTNNNVYANSLEFRLLRQHGYPVSQEIFSTCKDERGNFMVSSNDIKGMLSLYEASFYLVENEDGILEETREKTKKYLEEYIIMIMEKQQSLLDQNNNNDYDYDYELVSHALELPLHWRMLRLESRWFIDVYEKRLDMNPTLLTLAKLDFNIVQSIYQDDLKHVFSWWESTNMGKKLEFARDRTMVNFLWTVGVAFEPHFKSFRRMITKVNALITVIDDIYDVYGALDELELFTNAVERWDISAMDGLPEYMKTCFLALYNFINDLPFDVLKGEEGLHVIKFLQKSWADLCKSYLREARWYYNGYTPRFEEYIENAWISISGPVILSHLYFFVVNPNMEDALLSTCFNGYPTIIRHSSMILRLTDDLATSTDELKRGDVPKSIQCKMYEDGISEEEARQRIKLLISETWKLINKDYINLDDDDDDGDDYSPMFYESNNINKAFIEMCLNLGRMAHCIYQYGDGHGIQDRQTKDHVLSLLIHPIPLTQ

SEQ ID NO: 42 - protein, 573 aa, Artificial sequence
  Terpene Synthase Gene Amino acid sequence of the 45 identified gene products
MITGLISTTTFKEQPAIVRRSGNYKPPLWDAHFIQSLQVIYTEESYGKRINELKEDVRRILEKEAENPLVKLEQINDLSRLGISYHFEDQIKAILNLTYNNNNALWKKDNLYATALHFKLLRQYGFNPVSSGIFNAFKDEKKEFKESLSKDVKGMVCLYEASFYSFRGEPILDEARDFTTKHLKQYLMMTRQGKTVDHDDNNDLMVKLVEHALELPVHWRMKRLEARWFIDMYAEMSHHHHMNSTFLQLAKLDFNVVQSTYQEDLKHAVRWWKTTSLGERLPFARDRIVETFLWSVGVKFEPQFRYCRKMLTKMGQLVTSMDDIFDVYGTLDELSLFQDALERWDINTIDQLPDYMKIFFLAAYNVVNEMAYDVLKQNGILIIKYLKKTVWTDLCKCYMLEANWYHSGYTPSLEEYIKNGWISIAEPLILVNLYCLITNPIKEDDMDCLLQYPTFIRISGIIARLVDDLGTSSDELKRGDNPKSIQCYMKENGICDEKNGREHIRNLISETWKEMNEARVGESPFSQAFIETAIDFVRTAMMIYQKEQDGVGTNFDHYTKDGIISLFFTSIPI

SEQ ID NO: 43 - protein, 626 aa, Artificial sequence
  Terpene Synthase Gene Amino acid sequence of the 45 identified gene products
MAALVSIVSNIISFNNNNNTFIRSNHNTNIIYSNKTLLMSTNNSNIISRRSANYQPPLWQFDYVQSLSTPFKDGAYAKRVEKVKEEVRVMVKRAREEEKPLSQLELIDVLQRLGISYHFEDEINDILKHIYNNNNVYNTNNNVYANSLEFRLLRQHGYPVSQEIFSTCKDERGNFMVSSNDVKGMLSLYEASFYLVENEDGILEETRQTTKKYLEEYIIMIMEKQQSLLDQNNNNNDYDYDNYDYELVSHALELPLHWRMLRLESRWFIDVYEKRLDMNPTLLTLAKLDFNIVQSIYQDDLKHVFSWWESTGMGKKLEFARDRTMVNFLWTVGVAFEPHYKNFRRMITKVNALITVIDDIYDVYGTLDELELFTNAVERWDISAMDGLPEYMKTCFLALYNFINDLPFDVLKGEEGLHIIKFLQKSWADLCKSYLREARWYYNGYTPSFEEYIENAWISISGPVILSHLYFFVVNPIKEDTLLSTCFDGYPTIIRHSSMILRLKDDMGTSTDELKRGDVPKSIQCKMYEDGISEEEARQRIKLLISETWKLINKDYINLDDDDDGDDYSPMFYKSNNINKAFIEMCLNLGRMAHCIYQYGDGHGIQDRHTKDHVLSLLIHPIPLTQ

SEQ ID NO: 44 - protein, 585 aa, Artificial sequence
  Terpene Synthase Gene Amino acid sequence of the 45 identified gene products
MSNIQHQILLSLSQNNNNNNEKIIIHKNVVVRPTTKFHPSIWGDRFLHYNVSQQHLVCKEERVKELVEVVRKEIMISLLSSCDNNNNDIDELMKLIDSVQRLGLSHHFETQIEQMLESVYQYYYYSTTKHDLNYYKHDLHHDSIMFRLLRQHGFKVSSSIFEKFKDEKGNFKKSLITDVSGLLSLYEASYLSYVGESILDEALAFTTTHLKAIVANSKDHPLSHQISKALERPLRKTIERLHARFYISIYEKDASHNKVLLELAKLDFNLLQCFHKMELSEIMRWWKKHDFANKFPFARDRMVELYFWMLGIYYEPKYSRARKLTTKISALISITDDIYDAYGTIDELELLTQAMQRWDINFIDKLEPEYLKTYYKAMLTSYEEFEKEFTKEELYKHQYAKEQMKKLIRAYLEEARWLNDGYLPSFDEHLRVSYVSCAYTTLIATSYVGMYDIVTHETLNWLSKDPKIVSASTLLARFMDDIGSRKFEQERNHIPSTVECYMKQYGVSEKEAIEELNKRVVNYWKEINEDFIRPTVMPFPILVRVLNVTKVLDLLYKNGDDQYTHVGKLFKESIAALLIDPIPVL

SEQ ID NO: 45 - protein, 588 aa, Artificial sequence
  Terpene Synthase Gene Amino acid sequence of the 45 identified gene products
MQMAGVKFISYSSLYSATFSKRPSVIREVYSLKKKKNYKLPRFGNPLFMSTKCQSISSSSSPPPLLSIDHDPGMVADYYDNYKSTTSEELLIKKVEMALRKPTDDQSYKMRLIDSIQRLGVGHYFEEEIKVILQMLSDFNSGQDDLFNTGLRFRLLRHNGFPTTSDVFDKFINQKGEIEDVIMGQDTLGMLSLYEASYLAANCEESLVKAMEFTRSHLKSSMPFITQKLQNEVAKALELPRHLRMAPLEARNYIDEYGKELNHCPALLDLAKLEFNELQSLHKRELTEIIRWWKQLGLVEKLGFARDRPLECFLWVVGIFPGKCYSNVRIELAKTVSILLVIDDIYDTYGSLDELHLFNHAILRWDLGAMDKLPEYMKICYMALYNTTNEIGYRVLKEHGLCVTQHLKKVWLDIFDAFLTEAEWFDKKYTPTLEQYLTNGVTSGGSYMALVHSFFLIGHGITDQTISMMHPYPEIFSHSGKILRLWDDLGTAKEEQERGDVASSIDCYMKEENIESEDEARKHIKKLIRSSWIELNGELKAPSALPRSITTACFDLARTAQVIYQHGDDQSFLSVEDHVQSLFFRPCQ

SEQ ID NO: 46 - protein, 1257 aa, Artificial sequence
  ABC+PTR Transporter amino acid sequence (of the 12 identified gene products)
MDNKTNKHRGGNGDGDDNEDQDQEDTKKNNNNNNSNKVSLLKLFSFADFYDYVLMGIGTIGAIIHGASVPIFFIFFGKLINVIGMAYLFPKEASHKVAKYSLDFVYLSIAILFSSWTEVACWMHTGERQAAKMRMAYLRAMLSQDISLFDTEASTGEVISAITSDIIVVQDALSEKVGNFLHYISRFVVGFIVGFARVWQISLVTLSIVPLIALAGGVYAYIATGLIARVRKSYVKAGEIAEEVIGNVRTVQAFAGEEKAVKMYTSALAHTYMYGRKAGLAKGLGLGFMHCTLFLSWSLLVWYVSIVVHKSIANGGESFTTMLNVVIAGLSLGQAALDISAFVRAKAAAYPIFAMIERNTASKSSAMSGRKLGKLEGHIQFNNVTFSYPSRPDVTIFNKLSLDIPSGKIVALVGGSGSGKSTVISLIERFYEPLSGEILLDGNNIKELDLKWMRQQIGLVNQEPALFATSIRENILYGKDEASLDEITRAAKLSEAISFINNLPERFETQVGERGIQLSGGQKQRIAISRAIVKNPSILLLDEATSALDAESEKSVQEALDRVMVGRTTVVVAHRLSTIRNADIIAVVQEGKIVETGCHDELISNPNSVYSSLVQLQEAAPLQRNSSLGRPPSIKFSRELSRTTTSFGASFRSDKDSISRVGADGGAVEPVKTTNVSAKRLYSMIGPDWLYGLCGTICAFIAGAQMPLFALGISHALVSYYMDWDTTKHEVKKISILFCCGAVVTVIVHGIEHLCFGTMGERLTLRVRERMFSAMLRNEIAWFDDTNNTSSMLSSRLESDATLLRTIVVDRSTILLQNVGLVVASFIIAFLLNWRITLVVLATYPLVISGHISEKLFMQGYGGNLSKAYLKANMLAGEAVSNIRTVAAFCAEQKVLDLYARELVEPSKRSFTRGQIAGIFYGISQFFIFSSYGLALWYGSVLMGKELSSFKSVMKSFMVLIVTALAMGETLALAPDLLKGNQMVASVFEVLDRKTEVSGDSGEELASVDGTIELRDIHFSYPSRPDVVIFKDFNLKVRSGKSMALVGQSGSGKSSVISIILRFYDPTSGKVLIDGKDMKKLKLKSLRKHIGLVQQEPALFATSIYENILYGKEGASESEVIEAAKLANAHSFISALPEGYSTKVGERGVQLSGGQRQRVAIARAVLKNPEILLLDEATSALDVESERVVQQALDRLMKNRTTIMVAHRLSTIKNADQISVIQDGKIIEQGTHSTLIDNTNGPYYKLINIQQQQQQQL

SEQ ID NO: 47 - protein, 724 aa, Artificial sequence
  ABC+PTR Transporter amino acid sequence (of the 12 identified gene products)
MASVTPSTTIDQEHYHNKKVTISRTTSTTSSNNNTNHGNPRITVVEIETANNRNASYRSSIFGADHEVSLPVVEDHQGVFLTWQDLWVTVSSGKNSNRPILRGLTGYAKPGELLAIMGPSGCGKSTLLDALAGRLNANTRQSGDILINGNKQTLAYGTSAYVTQEDTLLTTLTVREAVHYSAQLQLPDSMSSAEKKERAEMTIREMGLTDAVNTRIGGSGLGTGSKGLSGGQKRRVSICIEILTRPKLLFLDEPTSGLDSAASYYVMSSIASLDIQSRRGGGAGGRRTVVASIHQPSSEVFQLFNTLCLLSAGKIVYFGPASAANEFFTMSGFPCPSLQNPSDHFLKTINKDFDKVQKDLEQGLPIRGRPTVEEAIETLVKSYKASENCQLVQQQVSQICNKKNKSVGLMEKKRSHAGFISQCGVLTRRSFKNMYRDLGYYWFRLVIYIGLAIGLGTIFCNIGHSDGSVEARASLIMYVASFLTFMTIGGFPSFVEDMKVFGRERLNGHYSVTSFVMGNTISAQPYLVLIALIPGALAYFPPGLRGGFEHFIYFVLVLYACMMLVESLMMIVAALVPNFLLGIITGAGIQGFMMLAGGFFRLPNDLPDPFWRYPVFYISFHRYAFQGLYKNEFKGLMFVDEILGKSHKISGDEILRNKYQVNMSYSKWVDFVLLLSMVFAYRVMFLLILKISENYKTISAAFAFGRRKPSTQVMENPTATPPHA

SEQ ID NO: 48 - protein, 725 aa, Artificial sequence
  ABC+PTR Transporter amino acid sequence (of the 12 identified gene products)
MASVTPSTTIDQDHYHNKKVTISRTSSTTSSSNTNHGNPRITVVEIETANRNASYRSSIFGADHEVSLPVVEDHQGVFLTWQDLWVTVSSGKNSNRPILRGLTGYAKPGELLAIMGPSGCGKSTLLDALAGRFECNTRQSGDILINGNKQTLAYGTSAYVTQEDTLLTTLTVREAVHYSAQLQLPDSMSSAEKKERAEMTIREMGLTDAVNTRIGGSGLGTGGKGLSGGQKRRVSICIEILHSSKLLFLDEPTSGLDSAASYYVMSSIASLDIQSRRGGGRGGRRTVVASITSQFEVFQLFNTLLPSFAGKIVYFGPASAANEVFFTMSGFPCPSLQNPSDHFLKTINKDFDKVQKDLEQGLPIRGRPTVEEAIETLVKSYKASENCQLVQQQVIQICKKKNKSVGLMEKKRSHAGFISQCGVLTRRSFKNMYRDLGYYWFRLVIYIGLAIGLGTIFCNIGHSDGSVEARASLIMYVASFLTFMTIGGFPSFVEDMKVFGRERLNGHYSVTSFVMGNTISAQPYLVLIALIPGALAYFPPGLRGGFEHFIYFVLVLYACMMLVESLMMIVAALVPNFLLGIITGAGIQGFMMLAGGFFRLPNDLPDPFWRYPVFYISFHRYAFQGLYKNEFKGLMFVDEILGKSHKISGDEILRNKYQVNMSYSKWVDFVLLLSMVLAYRVMFLLILKISENYKTISAAFAFGRRKPSTQVMENPTATPLIHRRV

SEQ ID NO: 49 - protein, 1429 aa, Artificial sequence
  ABC+PTR Transporter amino acid sequence (of the 12 identified gene products)
MESNDIYRGSNSMRSGSSSLWRNNNMEVFSKSSRDEDDEEALKWAALEKLPTYSRLRKGIFTTSKGESNEVDIHNLGFQQRKDLLERLVKVAEEDNERFLLKLKNRIDRVGLDVPTIEVRFEHVNVEADVHVGSRALPSFINFSINIFESVLGFLPIFNTKKKHLNILQDVSGVIKPGRLTLLLGPPSSGKTTLLLTLAGKLASELKFSGRVTYNGHDMNEFIPQRTAAYISQHDVHIGEMTVRETLSFSARFQGVGTRYDMLSELSRREREANIKPDTDIDVYMKAAALEGEETSVMTDYVLKILGLEVCADIMVGDEMLRGISGGQRKRVTTGEMLVGPAGVLLMDEISTGLDSSTTFQIVNSLKQYVHIFNGTNVISLLQPAPETYDLFDDIILLSDGQIVYQGPRENVLSFFEAMGFKCPERKGVADFLQEVTSRKDQAQYWARKDQPYRYVKVKDFAEAFKSFHVGQTIGDHLSTPYDKSKNHPAALTTKNYGVKKKEFLKACFSREYLLMKRNSFVYIFKIVQLVFMALIATTLFLRTEMKRNTVDDGGIYLGALFFTVIMIMFNGMSEIPMTIAKLPVFYKQRDLQFYPAWAYALPSWILKIPITLVEVAVWVAITYYSMGLDPNVGRLFRQYVALIFANQMSSALFRATAATGRNMIVANTFGTFVLVMLITLGGFVLSKDDIKGWWIWGYWTSPLMYGQTAVLVNEFLGENWRHTGPNSTKPLGIQVLESRGFFTRGYWYWLGLGAMTGFIIILNILYTVALTYLNPFEKAQSVKSEDPENDIQDDNRATEMQQRSNNSPNIGENQIAKKGMILPFEPHSISFDDVIYSVDMPQEMKTQGVGEDKLVLLKGVSGSFRPGVLTALMGVSGAGKTTLMDVLAGRKTGGYIEGDVRISGYPKKQETFARISGYCEQNDIHSPHVTIYESLLYSAWLRLPAEVDSKKREMFIEEVMELVELAPLRQALVGLPGVNGLSTEQRKRLTIAVELVANPSIIFMDEPTSGLDARAAAIVMRTVRNTVDTGRTVVCTIHQPSIDIFEAFDELFLMKRGGEEIYVGPLGRHSCHLISYFEAIEGVSKVKDGYNPATWMLEVSSSAQELALGVDFNKIYKSSELYRSNKQLIKELSIPAPGSKDLHFATQYSRSSFTQCIACLWKQRRSYWRNPPYTAVRFMFTTFIALMFGTIFWDLGSKRTRQQDIINSMGSMYSAVFFIGMQNAASVQPVVSIERTVFYRERAAGMYSAFPYTFGQVVVEIPYIFFQAAVYCLIVYAMIGYEWTAAKFFWYLFYTFFAMLYFTFYGMMCVGVTPNHHIASIVSSAFYGLWNIFAGFIVPRTRIPIWWRWYYWACPVAWTLYGLVTSQYGDLHEYIIIETGETLPQFLRRFFGYRHDFLEVVAVVNVAFTLIFAISFAFAIKTFNFQNR

SEQ ID NO: 50 - protein, 1459 aa, Artificial sequence
  ABC+PTR Transporter amino acid sequence (of the 12 identified gene products)
MEMSIRSSSSRNSSWRNNSNRVFERLPSFSRREEEEDDLQWFALEKLPTYNRLRKGLLITTSTGEAATHEIIDIHNLGLNQRKSLIERLVTIADEGNQKFLLKLKNRIDRVGIKLPTIEVRFEHLNVETDAYVGSRALPTFFNAYINIFERLLTHLHILSSRKKHLKILDDVSGIIKPGRMTLLLGPPSSGKTTLLLALAGKLDQNLKFSGRVTYNGHDMDEFIPRRTAAYISQYDEHIGEMTVRETLAFSARCQGVGSRYDMLSELSRREEEANIKPDLDLDVYMKATAIEGQETNVVTDYILRILGLEVCADTMVGDGMLRGISGGQRKRVTTGEMLVGPANALFMDEISSGLDSSTTYQIVNSLKQNVHILNGTTVISLLQPAPETFELFDDVILLSDGKIVYQGPRQQVLEFFEFMGFKCPERKGVADFLQEVTSKKDQEKYWVRDNEAYRFITVKEFADAYRSFKVGLKLEDELATPFDKRKNHKAALTTKIYGVKKIELLKACFSRELLLMKRNSFVYIFKLAQLAISALIATTVFFRTKMSHNSVEDGGIYIGALFFSVGATMFNGMSEISMTIAKLPVFYKQRNFLFFPSWAYALPTWILKIPISFLEVAVWMLITYYPIGFDPNIGRFFKQYLLLVAVSQMASGMCRFVGGITRDMITGGTVSSLMFLMLFGLGGFVLSRDDIKKWWIWGYWISPMMYGQNALVVNEFLGRSWSHAKPNSTEPLGIAVLKSRAFFVHAYWYWLGLGALIAFVLVFNIFYSLALTYLDSIGRPQAVKWEDSEINDDNDSSSHKTQKGKINYVCVFPCDPVRREDVRSRASEQRRGMILPFEPHSISFDNVTYSGMILPFEPHSISFDNVTYSVDMPEEMKNHGVLDDKLVLLNGISGCFRPGVLTALMGVSGAGKTTLMDVLAGRKTGGYVEGDIRISGYPKNQETFTRISGYCEQNDIHSPHVTVYESLLYSAWLRLPSNVDSETRKLFIEEVMELVELSPLRQALVGLPGVNGLSTEQRKRLTIAVELVANPSIVFMDEPTSGLDARAAAIVMRTVRNTVDTGRTVVCTIHQPSIDIFDAFDELLLLKRGGEEIYVGPLGRHSCHLINYFEGINGVSSIKAGSNPATWMLEVTTSAQEMALGVDFAEIYKNSELYRRNKEAIKGFSIPSPGSAELHFPSKYSQPFLTQCMACLWKQHKSYWRNPPYTAVRLLFSTIGALMFGTMFWDLGSKRKRQQTLMNAIGSMYAALPFAGSQNASSVQPVVSIERTVFYRERAAGMYSPFPYTLAQVIIEIPYNFVQATLYTIIVYTMIGFELNLVKFIWNLFFTFFTLSYYTYYGMMTVAATPNYHIASVVSSAFYGIWNLFSGFVIPRTRIPIWWRWYYWGCPIAWSLYGLVVSQYGDVKEEMDNGESVEEFVRRYYGYDREFLPVVAIVNVAFTVTFAFIFALSLKAFNFERR

SEQ ID NO: 51 - protein, 1439 aa, Artificial sequence
  ABC+PTR Transporter amino acid sequence (of the 12 identified gene products)
MEGADLYRAGNSLRNSMRSTSSSLWRNNNMEVFSKSSREEDDEDALKWAALEKLPTYSRLRKGILTTSKGESNEVDIHNLGFKERKDLLERLVKVAEEDNERFLLKLRNRIDRVGLDLPTIEVRFEQVNVEADVHIGSRALPSFINFTINIFEGLLGFLPIFNSKKKHLNILNDVSGVIKPGRLTLLLGPPSSGKTTLLLTLAGKLAKDLKFSGRVTYNGHEMNEFVPVRTAAYISQHDVHIGEMTVRETLSFSARCQGVGTRFDMLAELARREKEANIKPDADIDVYMKAVATEGQETNVVTDYVLKILGLEVCADTMVGDEMLRGISGGQRKRVTTGEMLVGPAGVLFMDEISTGLDSSTTYQIVNSLKQYVHIFNGTNVISLLQPAPETYDLFDDIILLSDGQIVYQGPRENVLAFFESMGFKCPERKGVADFLQEVTSRKDQGQYWARRDQPYRYVTVKEFAESFQSFHVGQKIGDHLATPYDKSKNHPAALTTKSYGVKKKEFIKACFSREYLLMQRNSFVYIFKLVQLAIMALVATTLFLRTEMNRNTVEDGGIYLGALFFTVIMVMFNGMSELPMTIAKLPVFYKQRDLQFYPAWAYALPSWILKIPIAFLEVAVWVAITYYSIGLDPSVGRLFRQYLALIFVNQMASALFRATAATGRNMIIANTFGSFVLLLLFTLGGFVLSRDDIKSWWIWGYWVSPLMYGQTAVLVNEFLGEKWRRVLPGSTESLGVEVLKSRGFFTEAYWYWIGLAGLTGFIILLNLLYMLALTFLNPLENAKSVKSDDSENDVQDSRARGAIEMNQRANSSSHHSQTVDESINAKKGMILPFEPHSICFDDVIYSVDMPQEMKSQGVVEDKLVLLKGVSGSFRPGVLTALMGVSGAGKTTLMDVLAGRKTGGYIEGDVRISGYPKKQETFARISGYCEQNDIHSPHVTIYESLLYSAWLRLPAEVDSEKRRMFIEEVMELVELTSLRQALVGLPGVNGLSTEQRKRLTIAVELVANPSIIFMDEPTSGLDARAAAIVMRTVRNTVDTGRTVVCTIHQPSIDIFEAFDELFLMKRGGEEIYVGPLGRHSCHLINYFEAIEGVSKIRDGYNPATWMLEVSSSAQEISLGVDFTKVYKGSELYRRNKQLIKELSTPAPGSKDLYFPTQYSRSFVTQCMACLWKQRLSYWRNPPYTAVRFIFTTFIALTFGTMFWDLGSKRSKQQDLINAMGSMYAAVFFIGVQNASSVQPVVSIERTVFYREKAAGMYSAFPYTFGQAVVEIPYILCQALVYCLIVYSMINFEWTAAKFFWYLFYTFFAMLYFTFYGMMTVAITPNHHIASIVSSAFYGVWNLFSGFVVPRTRMPIWWRWYYYACPVAWTLYGLVASQYGDVTEVLNQETGETVQQFLRRFYGFKHDYLGVVAVVNVAFALFFGIIFAFAVKALNFQKR

SEQ ID NO: 52 - protein, 1424 aa, Artificial sequence
  ABC+PTR Transporter amino acid sequence (of the 12 identified gene products)
MDGGDVYRAGNSLRNSMRNGSTSLWRNNNMEVFSKSSREEDDEDALKWAALEKLPTYSRLRKGILTTSKGESNEVDIHELGFKERKNLLERLVKVAEEDNEKFLFKLKNRIDRVGLDVPTIEVRFEHVNVEAEIHVGSRALPSFINFSINIVEGLLGFLPIFNTKKKHLNILEDVSGVIKPGRLTLLLGPPSSGKTTLLLTLAGKLASELKFSGRVTYNGHEMNEFIPQRTAAYISQHDVHIGEMTVRETLSFSARCQGVGTRYDMLSELSRREREANIKPDPDVDVYMKAAAIEGQETSVMTDYVLKILGLEVCADTMVGDEMLRGISGGQRKRVTTGEMLVGPAGVLLMDEISTGLDSSTTFQIVNSLKQYVHIFNGTNVISLLQPAPETYDLFDDIILLSDGQIVYQGPRENVLSFFESMGFKCPERKGVADFLQEVTSRKDQAQYWARREQPYRYVTVKEFAEAFKSFHVGQRIDDYLLTPYDKSKNHPAALTTKNYGVSKKEFLKACFSREYLLMHRNSFVYIFKLIQLTFMALVATTLFLRTEMHRNTVDDGSIYLGSLFFTAVMIMFNGMSELPMTIAKLPVFYKQRDLQFYPAWAYALPSWILKIPITFLEVGVWVAITYYSIGLDPNVGRLFRQYLVLIFINQMASALFRATAATGRNMIIANTFGSFVLVMLVTLGGFVLSRDDIKGWWIWGYWISPLMYGQTAVLVNEFLGQKWRHTGPNSTQPLGIQVLESRGFFTRGYWYWLGLGALIGFIIILNILYTLALTYLNPFEKSQSVKAEDTENDIQDGQQNSSNIGENQVAKKGMILPFEPHSISFDDVVYSVDMPQEMKNQGVVDDKLVLLKGVSGSFRPGVLTALMGVSGAGKTTLMDVLAGRKTGGYIEGDVRISGYPKNQQTFARISGYCEQNDIHSPHVTIYESLVYSAWLRLPAEVDSEKRKMFIEEVMELVELTPLRQALVGLPGVNGLSTEQRKRLTIAVELVANPSIIFMDEPTSGLDARAAAIVMRTVRNTVDTGRTVVCTIHQPSIDIFEAFDELFLMKRGGEEIYVGPLGRHSCHLVNYFEAIEGVSKIKDGYNPATWMLEVSSSAQEIALGVDFNKIYKSSELYRSNKQLIKELSTPAPDSNDLYFPTQYSRSFYTQCIACLWKQRLSYWRNPPYTAVRFMFTAFIGLMFGTMFWDLGSKKSRQQDIINSMGSMYAAVFFIGVQNASSVQPVVSIERTVFYRERAAGMYSCFPYSFGQVVVEIPYIFIQASVYCLIVYAMIGFEWTAAKFFWYLFFTFFAMLYFTFYGMMTVGVTPNHHIASIVSSAFYGLWNIFAGFVVPRTRIPIWWRWYYWGCPVAWTLYGLVASQYGDLSEDIIAETGESVEQFLRRFFGFRHDFLEFVALANVAFAVLFAIIFAFSIKLFNFQSR

SEQ ID NO: 53 - protein, 568 aa, Artificial sequence
  ABC+PTR Transporter amino acid sequence (of the 12 identified gene products)
MNMEVMSRDFDQSGGGKRGGNRAAFFVYIMEGLESMAFISNSASLVIYFFSYMNYSLTKSSTMLTNLLGTATLLSLLGGFISDTYLTRFATTLIFASIELMGYIVLLVQAHRSDLRPPKCLSITHQCEGASAGEAAILYTGLYLMALGTGGVKAALPALGADQFDPKKAKQLSTYFNWFIFSLTIGSILGVTLVVWISTDKGWDWAFAVCAIALLLSIFFISLGNPFYRNNLPKGSPLLRFLRVFVASFRNRKLPIPENADELHEIYQDKEDDNLHHEILQRTDQFKFLDRAAVIRRTEDDDNDGSNSGSEWRVCTVTEVEETKILIRMLPIILTTIFMNTCLAQLQTFSVQQSVTMDRDFIGFEIPGPSVPAIPLLFMFILIPLYDRVFVPIARRVTGIPTGISHLQRIGIGLVLSAISMTVAGFVEKKRRNVAIQHDMVDSQDALPISVFWLGYQYAIFGAADMFTLVGMLEFFYAESSAGMKALSTAISWCSLAFGYYLSSVVVEIVNKVSGGWLANNNLNRDKLENFYWLLAGLSVVNFGVYVMCASWYKYKNVEMIKKDDAST

SEQ ID NO: 54 - protein, 584 aa, Artificial sequence
  ABC+PTR Transporter amino acid sequence (of the 12 identified gene products)
MNSRDFEVGSKSSNNDETNKNKALISKKQGGNRAALFVYATEGLENMAFIAIAVSLVTYFYGYMNYSLTKSSTMLTNFMGTSFLLALVGGFICDTYLTRFKTCLIFASFELLGYTLLLVQAHRSELRPPKCVDNINHQCVEATTGEASILYVGLYLVALGTGGIKAALPSLGADQFDERDPKESSQLSSFFNWFLFSLTIGAIFGVTVVVWISTNKGWDRGFAVCLVAVFFALLSLTFGKSLYRHNVPKGSPLLRFIRVVFVASIKNRKLPIPENSDELYEIGEDKEAAILNNHQEFLQRTDQFKCLDRAAVIRTDGITGKWRVCTVTEVEETKILVRMLPIILSTVFMNTCLAQLQTFSVQQGTTMDTTINGFEVPAASIPVIPLLFMFILIPIYDKIFVPIARRITGIPTGIRHLQRIGVGLVLSAISMTVAGIVEKKRKNVAIEHGMVDSLAPLPISLLWLGFQYAIFGAADMFTLVGLLEFFYAESSAGMKSLSTAISWCSFAFGYYLSTVVVEIVNKVSGGWLANNNLNRDKLEYFYWLLAGLSVVNFGVYVLCASWYRYKKLEVPVVEKNDVLKEIKP

SEQ ID NO: 55 - protein, 1438 aa, Artificial sequence
  ABC+PTR Transporter amino acid sequence (of the 12 identified gene products)
MEVGDLYKAGNSLRSSKGSSVWRGNNNNNNNKDEFFSKSRREDDIDDEEALTWAALEKLPTYDRLRKGILTTSKGKPTEVDVINLGSKERKDLLRRLVNVADEDNESFLLKLKQRIQTVGIELPTIEVRYENIKVEADVHVGSRALPSFINFCVNILEMLVSFLPILKSKKKHVTILDDVSGAIKPGRLTLLLGPPNSGKTTLLLTLAGKLASELKFSGRVTYNGHEMNEFIPQRTAAYISQHDVHIGEMTVRETLSFSARCQGVGTRYDMLAELSRREKEANITPDPDIDVFMKAASAEGQESSVITDYIIKILGLEGCADTMVGNEMLRGISGGQKKRVTTGEMLVGPAGALFMDEISTGLDSSTTFQIVNSLKQFAHIFEETIVISLLQPAPETYDLFDDIILLSDGQIVYQGPRENVLEFFELTGFKCPERKAIADFLQEVTSRKDQAQYWARSDQPYKFVTVNEFVEAFQSFHIGKKVVEHLSIPFDKTKSHPAALTTKPYGLNKMELLKACMSREFLLMKRNSFVHIFKIVQLGILGLISATIFLRTKMHHKTLQDGSIYLGALFFSTLMIMFNGLSEVPMTIVKLPVFYKQRDLQFFPAWAYALPSMIYKAPVAFIEVLVWMTITYYSIGFDPYFGRVVKLYVLFVIINQMASGLFRAIASIGRSMIIANTFGAFSLLLLFVLGGFVLSRDFIKGWWIWGYWISPLMYGQTGVVVNEFNGNKWKHVPPNSTETLGVQVLKARGFFTDSYWYWLGFAALSAYVVIFNFVYTLALTYLNPLEQRQAVSNENSESGDIQNDEEGEVIEMTQRPKNMGENQSKKKGMILPFEPHSICFDDVCYSVDMPQEMKGQGVVEDKLVLLKSVSGSFRPGVLTALMGVSGAGKTTLMDVLAGRKTGGYIEGDIRISGYPKKQETFARISGYCEQNDIHSPYVTVYESLLYSAWLRLPSEVDMDTRKMFIEEVMELVELVPLRQALVGLPGVNGLSTEQRKRLTIAVELVANPSIIFMDEPTSGLDARAAAIVMRTVRNTVDTGRTVVCTIHQPSIDIFEAFDELFLLKIGGEEIYVGPLGRHSCHLINYFEAIEGVSKIKEGYNPGTWMLEVSSSAQEMALGVDFANIYKNSDLYKRNKELIKELSTPAPGSKDLYFPTQFSRSLYTQCIACLWKQRQSYWRNPLYTAVRFMFTTFIALMFGTMFWDLGSKRSNKQDLTNALGSMYSAVLFIGVQNSSSVQPVVGVERTVFYREKAAGMFSAFPYTFGQVVVEIPYIICQAVVYCLIVYAMMGFEWTAVKFFWYLFFTFFSMLYFTFYGMMAVGITPNNHVASIISAAFYSIWNLFSGFIVPRTRIPIWWRWYYWGCPTAWTLYGLLVSQYGDVEDVMDAETGETVKQYLKSYFGYKHDFIGVVAMVNVFYGLLFGGIFALSIKVLNFQNR

SEQ ID NO: 56 - protein, 1446 aa, Artificial sequence
  ABC+PTR Transporter amino acid sequence (of the 12 identified gene products)
MEVGDLYRAGNSLRNISLRSSTSSVWRGNNNNNNNKDEYFSKSRREDDINDEEALTWAALEKLPTYDRLRKGILTTSKGETTEVDVINLGFKQRKDLLQRLVNVADEDNESFLLKLKQRIQTVGIDLPTIEVRFENVKVEADVHVGSRALPSFINFCINIIEMLVSFLPILKSKKKHVTILDDVSGAIKPGRLTLLLGPPSSGKTTLLLTLAGKLASELKFSGRVTYNGHEMNEFIPQRTAAYISQHDVHIGEMTVRETLSFSARCQGVGTRYEMLAELSRREKEANIKPDPDIDIFMKATSTEGQKSSVVTDYVLKILGLEVCADTVVGDEMLRGISGGQRKRVTTGEMLVGPSGVLFMDEISTGLDSSTTYQIVNSLKQYVHIFNGTNVISLLQPAPETYDLFDDIILLSDGHIVYQGPRENVLEFFEFTGFKCPERKAIADFLQEVTSKKDQAQYWTRGDEAYRFVSAKEFVEAFKSFHVGQKIREYLSTPFDKTKSHPAALTTKNFGLNKMELLKACMSREYLIMKRNSFVHIFKIVQLSVMGLIHGTLFLRTKMHHRTLEDGTIYLGSLFFAALMIMFNGMSEIPMTIAKLPVFYKQRDLQFFPAWAYAVPSMLFKVPIAFLEVAVWIILTYYTTGLEPSVVRMFRLYFILVIVNQMASGLFRSIAALSRNMIIANTFGAFSLLLLFVLGGFVLSRDDINSGWIWAYWVTPLMYGQTGILVNEFRGSKWNKVTPNSTETLGIQVLKSKGFFTDSYWYWLGFGVLVAYTVLFNILYTLALNYLNSIEKSQALSNEDPENNDHEIQVGRETRTNEIQQTSSINNTGENQSKKKGMILPFEPHSITFNDVIYSVDMPQAMKNQGVVEDKLVLLKGVSGSFRPGVLTALMGISGAGKTTLMDVLAGRKTGGYIEGDIRISGYPKKQETFARISGYCEQNDIHSPHVTVYESLLYSAWLRLPTEVDSEKRKMFIEEVMELVELTPLRQALVGLPGVSGLSTEQRKRLTIAVELVANPSIIFMDEPTSGLDARAAAIVMRTVRNTVDTGRTVVCTIHQPSIDIFEAFDELFLMKRGGEEIYVGPLGRHSCHLINYFEAIEGVSKIKNGYNPGTWMLEVSSSAQEIALGVDFANIYKNSELCKRNKDLIKELSSPAPGSKDLYFPTQFSRSLNTQCIACLWKQRQSYWRNPLYTAVRFMFTTFIALIFGTVFWDLGSKRSNIQDLSNALGSMYCAVLFIGIQNASSVQPVVSVERSVFYREKAAGMYSAFPYSFGQLVVEIPYILCQSVVYCLIVYAMIGFEWTAIKFFWFLFFSFFSMLYFTFYGMMAVGITPNNHIASIVSSAFYSVWNLFSGFIIPRTRMPVWWKWYYWGCPVSWTLYGLLVSQYGDVDDVINAVTGETVKQYLRSYLGYKHDFIGVVAVVNVLFALLFGSIFAFSVKILNFQNR

SEQ ID NO: 57 - protein, 1446 aa, Artificial sequence
  ABC+PTR Transporter amino acid sequence (of the 12 identified gene products)
MEVGDLYRAGNSLRNISLRSSTSSVWRGNNNNNNNKDEYFLKSRREDDINDEEALTWAALEKLPTYDRLRKGILTTSKGETTEVDVINLGFKQRKDLLQRLVNVADEDNESFLLKLKQRIQTVGIDLPTIEVRFENVKVEADVHVGSRALPSFINFCINIIEMLVSFLPILKGKKKHVTILDDVSGAIKPGRLTLLLGPPSSGKTTLLLTLAGKLASELKFSGRVTYNGHEMNEFIPQRTAAYISQHDVHIGEMTVRETLSFSARCQGVGTRYEMLAELSRREKEANIKPDPDIDIVMKASAIEGQESSVITDYIIKILGLEGCADTMVGNEMLRGISGGQKKRVTTGEMLVGPSGVLFMDEISTGLDSSTTYQIVNSLKQYVHIFNGTNVISLLQPAPETYDLFDDIILLSDGHIVYQGPRENVLEFFEFTGFKCPERKAIADFLQEVTSKKDQAQYWTRGDEAYRFVSAKEFVEAFKSFHVGQKIREYLSTPFDKTKSHPAALTTKNFGLNKMELLKACMSREYLIMKRNSFVHIFKIVQLSVMGLIHGTLFLRTKMHHRTLEDGTIYLGSLFFAALMIMFNGMSEIPMTIAKLPVFYKQRDLQFFPAWAYAVPSMLFKVPIAFLEVAVWIILTYYTTGLEPSVVRMFRLYFILVIVNQMASGLFRSIAALSRNMIFANTFGSFVLLLLIVLGGFILSKDDINSGWIWAYWVTPLMYGQTGILVNEFRGSKWNKVTPNSTETLGIQVLKSRGFFTDSYWYWLGFGVLVAYTVLFNILYTLALNYLNSIEKSQALSNEDPENNDQEIQDGRETRTNEIQQTSSINNTGENQSKKKGMILPFEPHSITFNDVIYSVDMPQAMKNQGVVEDKLVLLKGVSGSFRPGVLTALMGISGAGKTTLMDVLAGRKTGGYIEGDIRISGYPKKQETFARISGYCEQNDIHSPHVTVYESLLYSAWLRLPTEVDSEKRKMFIEEVMELVELTPLRQALVGLPGVSGLSTEQRKRLTIAVELVANPSIIFMDEPTSGLDARAAAIVMRTVRNTVDTGRTVVCTIHQPSIDIFEAFDELFLMKRGGEGIYVGPLGRHSCHLINYFEAIEGVSKIKNGYNPGTWMLEVSSSAQEIALGVDFANIYKNSELCKRNKELIKELSSPAPGSKDLYFPTQFSRSLNTQCIACLWKQRQSYWRNPLYTAVRFMFTTFIALIFGTVFWDLGSKRSNIQDLSNALGSMYCAVLFIGIQNASSVQPVVSVERSVFYREKAAGMYSAFPYSFGQMVVEIPYILCQSVVYCLIVYAMIGFEWTAIKFFWFLFFSFFSMLYFTFYGMMAVGITPNNHIASIISSAFYSVWNLFSGFIIPRTRMPVWWKWYYWGCPVSWTLYGLLVSQYGDVDDVINAVTGETVKQYLRSYLGYKHDFIGVVAVVNVLFALLFGSIFAFSVKILNFQNR

SEQ ID NO: 58 - DNA, 1869 bp, Artificial sequence
  Terpene Synthase Gene Nucleic acid sequence of the 45 identified gene products
atggcttgcataactgttcaacaccatttttcttcattactccctaatatttgcagtagtactaattttggtgtattttatagaccaaaaatatatactaactataatattattaatggtggtacaaaatcaagattatcaagtgcatgctaccccatcatatgtgctgtggtcaatagttctaatgcaattattgatcgacgatctgccaactttgagccctccatttggtcttttgattatattcaatctcttacaagccaatataaggaagaatcttatacaggtcgagtcaaagaattggagatagatgtgaaaaagatgttaattgagatggaaaattctttaattcaacttgaactcattgacacattgcaaagacttggagtatcttatcgttttgaggatgaaataaatactattttgaaagaaaaatatattaatatgatcaataaccctaattataataatttatatgtcactgctcttgaatttaggcttctacgtcaacatggctatgcagtacctcaagagatttttaatcattttaaggacgagataggaaaaatcaaaacgaacatgattagtgatgatattatggaagtattggccttatatgaagcttcattctatgagaaaaaaggcgaaagtattttagaagaagttagaattttcacaactcaatatctaaagaactacattataatgatatcacaagaaagaaagttaatgattgataatgataatgattatgattatgatatcgaaatagtgaatcacgctttggagctcccacttcattggaggactacaagaacagaagctaagtggttcatcgacgcgtatgagaaaaaacaagacatgaatcctattttgcttgagtttgctaaactcgatttcaacatgatacaatcaacacatcatgacgatctaaaacatatattcaggtggtggaggcatactaaacttggggagaaattgaattttgcaagagatcgattgatggaatgtttcttatggaaagttggaataagatttgagccaaaattcagttattttagaaaaacaactgccaaattatttgagctaataacagtaattgatgatatatatgatgtttatggaacattggatgaattagagcttttcaccaaagctattgagagatgggatatggaaatgataaatgagttaccagaatatatgaagatgccttatattgttttacacaataccattaatgaaatggtatttgaggtattaagagaccaacacatctccatcaacattcaataccttaagaaaacgtgggtagatatgtgtagaggttttttacaagaggcaaaatggtactatagtggatatacaccaacactagaagaatatattaaaaatggttggatttcagtgggagcaccggttctaattgtgcatgcttatttttctcatgcaaattataatcacacagttacaagtagtaaagagattttcgaatgctttgaacatggttattatcccgccataattcgtcatagtgccataatattacgacttacaaatgacctagcaacatcatcggaggaactgaaaagaggtgatgctccgacatcaattcaatgttatatgcaagaaaaaaaagtatctgaggagaaagctcgtgaacatattaagtttttaataagtgaaatatggaaagagatgaataatgatgttggattatatccaatctcattgattgaagatgctacaaattttgctaagatgggatttttcatgtatcagcatggtgatggtcatagttctcaagataatcaatccaaacaaaaaatttcatccttgattattgaacctattcccttatatacataa

SEQ ID NO: 59 - DNA, 1857 bp, Artificial sequence
  Terpene Synthase Gene Nucleic acid sequence of the 45 identified gene products
atgcattgcataacccttaaacaccaaatttctccattactccctaatatttgcagtactactaattttggtgtattttttagaccaaaattatatactaattataatattattaatggtggtacaaaatcaagattatcaagtgcatgctaccccatccaatgtgctgtggtcaatagttctaatgcaattattgatcgacgatcagccaactttgagccctccatttggtctttcgattatattcaatctcttacaagtcaatataagggagaaccttatacaagtcgagtgaaaaaacttgagagagatgtgaaaaaaatattagttgagatggaaaactctttagctcaacttgaactcattgatacattgcaaagacttggaatatcttaccgttttgagaatgaaataaattctattttgaacaaaaaatatcttaatattaataatcctaattataatttatatgctattgctcttcaatttaggcttctacgtcaacatggctatgcagtacctcaagaaatttttaatcagttgaaggacgagatagaaaaaatcaaaaaacacataaatggtaatgatatcatgggaatattagccttatacgaagcttctttttatgagaaaaaagacgaaagtattttaaaggaagctagaattttcacaactaaatgtctcaaaaactacactataatgatatcagagcaaaaaaagttaatgattgataatgattatgattatgatatcgaagtagtgaatcatgccttagagctcccacttcatcggaggaccacaagaacagaagcaaagtggttcattgacgcatatgcgaaaaaacaagacatgaatcctatgttgcttgagttagccaaactcgatttcaacatagtacaatcaacacatcatgaagatctaaaacatatattcaggtggtggagacatactaaacttggagagaaattgaattttgcaagagatcgattgatggaatgtttcttatggaatattggaataagatttgagtcaaaattcagctattttagaacaaaaactgccaaattatttgagctagtaacatttatagatgatatatatgatgtttatggaacattggatgaattagagcttttcaccaaagctgttgagagatgggatgtgaaaatgataaatgagttaccagaatacatgaagatgccttatcttgttttacacaataccataaatgatatggtctttgaggtgttaagagaccaaggaatctccatcaacattcaataccttaagaaaacgtgggtcgatatgtgtaaaagtttcttgcaagaggcaaaatggtactatagtggatacacaccaacaatggaagaatatattgaaaatggttggatttcagtaggagcaccagttattcttgtgcatgcttatttttttcacgcaaataataatcgtacaattacaaatactaaagagattttcgaatgcttggaatatggttattatcctgccattattcgtcacagtgccataatattacgatttacaaatgacctagcaacatcatcggaggaattgaaaagaggtgatgctccgacatcaattcaatgttacatgcaagaaaaaaatgtatctgaagaggaagctcgtgaacatattaagtttttaataaatgaagcatggaaggagatgaataatgatgttggattatatccaatctcattgactgaagatgctacaaactttgctaagatgggatttttcatatatcaacatggtgatggtcatagttctcaagataatcaatccaaacaaaaaatttcatccttgattattgaacctattcccctatatacataa

SEQ ID NO: 60 - DNA, 1908 bp, Artificial sequence
  Terpene Synthase Gene Nucleic acid sequence of the 45 identified gene products
atgcagtgcatggcttttcaccaatttgctccatcatcatccctccctatttggagtagaattaataatcgtcttacaccaaaaacttctattattacttctatttcaaaaccaaaatcaaacttgaaatcgagatcgagatcaagtacttgctaccccatacaatgtactgtggtcgataaccctagttctacgattactaataatagtgatcgaagatcagccaactatggacctcccatttggtcttttgattttattcaatctcttccaatccaatataagggagaatcctatacaaggcaattaaataagttgaagaaagaagtgacaagaatggtccttggactggaaattaactctttagccctacttgagctaattgatacattgcaaaggcttggaatatcttaccattttaagaatgaaataaacactattttgaagaaaaaatacactgataattatattaacaataatattattattactaaccctaattataataatttatatgccattgctctcgaatttaggcttctacgccaacatggctatacagtacctcaagaaatttttaatgctttcaaggataagagagggaaatttaaaacatgcttgagtgatgatattatgggagtattgtgtttatatgaagcttcattctatgctatgaaacatgaaaatattttggaggaagcaagaattttttcaactaaatgtcttaaaaaatacatggagaaaatggagaatgaggaagagaaaaaaatattattattagatgataataatattaatagtaatttgctattaattaatcacgctttcgagcttccgcttcattggagaataacaagatcggaagctaggtggttcattgacgaaatatatgagaaaaaacaagacatgaattcgactttgttcgagtttgcgaaattagattttaatatagtgcaatcaacacaccaagaagatttacaacatttatcgaggtggtggagggattgtaaacttggtgggaaattgaattttgctagagatagattgatggaagctttcttatgggatgttggactaaaattcgagggagaattcagctattttagaagaataaatgcaagattatttgtgcttataacaataattgatgatatttatgatgtatatggaactttggaggaattagagcttttcactagtgctgttgaaagatgggatgtgaaattaatcaatgagttaccagattacatgaagatgcctttctttgttttacacaataccataaatgagatggggttcgatgtattagtacaacaaaactttgtcaacattgaataccttaagaaatcgtgggtagatttatgtaaatgttatttacaagaagcaaaatggtattatagtggataccaaccaacattggaagaatacactgagttgggttggctttcaataggagcatcagtaattcttatgcatgcttatttttgtttcacaaatcctataacaaaacaagacttgaaaagtttgcaattgcaacatcattatcccaacataattaaacaagcatgcttgattacaaggcttgcagatgatttaggaacatcttcggatgaattgaatagaggcgacgttcctaaatcgattcaatgttacatgtacgataataatgctaccgaagacgaagctcgtgaacacatcaagttcttgataagtgaaacatggaaggatatgaataagaaagatgaagatgagagttgtttatcagaaaattttgttgaagtttgcaaaaatatggctagaacagcactattcatatatgagaatggagatggacatggttctcagaatagtttatcaaaagaacgtatttcaaccttgattattactccaattaatattcctaaataa

SEQ ID NO: 61 - DNA, 1872 bp, Artificial sequence
  Terpene Synthase Gene Nucleic acid sequence of the 45 identified gene products
atgcagtgcatagcttttcaccaatttgcttcatcatcatccctccctatttggagtagtattgataatcgttttacaccaaaaacttctattacttctatttcaaaaccaaaaccaaaactaaaatcaaaatcaaacttgaaatcgagatcgagatcaagtacttgctacccaatacaatgtactgtggtcgataaccctagttctacgattactaataatagtgatcgaagatcagccaactatggacctcccatttggtcttttgattttgttcaatctcttccaatccaatataagggtgaatcttatacaagtcgattaaataagttggagaaagatgtgaaaaggatgctaattggagtggaaaactctttagcccaacttgaactaattgatacaatacaaagacttggaatatcttatcgttttgaaaatgaaatcatttctattttgaaagaaaaattcaccaataataataacaaccctaatcctattaattatgatttatatgctactgctctccaatttaggcttctacgccaatatggatttgaagtacctcaagaaattttcaataattttaaaaatcacaagacaggagagttcaaggcaaatataagtaatgatattatgggagcattgggcttatatgaagcttcattccatgggaaaaagggtgaaagtattttggaagaagcaagaattttcacaacaaaatgtctcaaaaaatacaaattaatgtcaagtagtaataataataatatgacattaatatcattattagtgaatcatgctttggagatgccacttcaatggagaatcacaagatcagaagctaaatggtttattgaagaaatatatgaaagaaaacaagacatgaatccaactttacttgagtttgccaaattggatttcaatatgctgcaatcaacatatcaagaggagctcaaagtactctctaggtggtggaaggattctaaacttggagagaaattgcctttcgttagagatagattggtggagtgtttcttatggcaagttggagtaagatttgagccacaattcagttactttagaataatggatacaaaactctatgttctattaacaataattgatgatatgcatgacatttatggaacattggaggaactacaacttttcactaatgctcttcaaagatgggatttgaaagaattagataagttaccagattatatgaagacagctttctactttacatacaatttcacaaatgaattggcatttgatgtattacaagaacatggttttgttcacattgaatacttcaagaaactgatggtagagttgtgtaaacatcatttgcaagaggcaaaatggttttatagtggatacaaaccaacattgcaagaatatgttgagaatggatggttgtctgtgggaggacaagttattcttatgcatgcatatttcgcttttacaaatcctgttaccaaagaggcattggaatgtctaaaagacggtcatcctaacatagttcgccatgcatcgataatattacgacttgcagatgatctaggaacattgtcggatgaactgaaaagaggcgatgttcctaaatcaattcaatgttatatgcacgatactggtgcttctgaagatgaagctcgtgagcacataaaatatttaataagtgaatcatggaaggagatgaataatgaagatggaaatattaactcttttttctcaaatgaatttgttcaagtttgcaaaaatcttggtagagcgtcacaattcatgtatcagtatggcgatggacatgcttctcagaataatctatcgaaagagcgcgttttagggttgattattactcctatccccatgtaa

SEQ ID NO: 62 - DNA, 1845 bp, Artificial sequence
  Terpene Synthase Gene Nucleic acid sequence of the 45 identified gene products
atgttttgcttgggagttcatcaattttctccactttcattaatccttaatactacaaaattagcaagagcaagtacattatcaagtgcttgctaccccatccaatgtactatggtcaatagtacaaatattactaataatactactatatttgataatcatattcatagaagatcagccaattatgaacctcccatttggtcttttgattacattcaatctctttcatcaagccaatataagggagaaacatgtacaagtagattgaatgagctagaggcaaatgtgaaagagatattgttagttgagatgaaatctaactctttagctcaacttgagtttattgatgcattgcaaagacttggattatcttaccgtttcgagactgaaataaacactattttaaatgaaaagtactccggtaatattatcgataaccctaattataatttgtacgccacagctctcgaattcaggcttctacgccatcatggttatgatgtatctcaagaaattttcaatgtgtttaaggatgagattacaagcaagttcaaggcaagaacgagtggcgaagatataattggagtattggctttatacgaagcttcattctatggcaaaaaaagtgaaagtattttggaagaagctagggtttcctcaatcgaatgtctcgaaaattacgtagcaactatgacgatggagcgaaacaaaccatcattattagtcaatgattatgatgatgataataatatgttattattagtgaatcatgccttggagcttccactttattggagaataacaagatcagaagcaaggtggttcattgatttatatgaaaaaaatcataacatgaattctactttgcttgaatttgccaaattggattacaacatggtacaatccatatatcaagaagatctaaaacatctctcaaggtggtggagccatacaaaacttggagagaaaatggatttctttagagatagattaatggagtgtttcttatggactgtgggaatagcatgtgagccagaaaaaagctattatagaagaatgtctggaagattatatgttctaataacaacaattgatgatatatatgatgtttatggaacattggaggaattagagcttttcactaatgcagttgagagatgggatgtgaaagcaatggatgatttaccagaatatatgaggatgcctttctttcttttacacaataccataaacgaaatggctttcgatgtgttaggacaccaaaatttcctcaacgttaaattccttaagaggacgtgggtagatttctgtaaacatcaattacaagaggcaaaatggtttcacagtggatacaaaccaacattcgaagaatacattaacaatgcatggatttcggtatcaggaccgattattcttatggatgcttatttctctcttacaaatcctgttacaaaagatgccataaatttactggaattaggttatccacccataatttaccatgcatccatgattctacgacttacagatgatctaggaacatcgaatgatgaaatgaaaagaggtgatattccgaaatcaattcaatgttacatgaacgatacaggtgtttctgaagatgaagctcgagatcatatgaagtttctaataagtgaattatggaaggaaataaataatgaagatgaaaatatggactctcctttctcaaaacaatttcttcaaaattgtaaaaatcttgctagaatatcacaatttatatatcaatatggagatggacatgcttctcaggatagtttatcaaaacaaagaatttcagaattgataattaatcatattccttcttaa

SEQ ID NO: 63 - DNA, 1659 bp, Artificial sequence
  Terpene Synthase Gene Nucleic acid sequence of the 45 identified gene products
atgtcaaatattcaagtcttagcttcatctcaattatgtgacaaaattattgctcgtccaacaacaaattttcacccttctatttggggcgatcgattcctccattacaatatttcagaacaagacttggtttgcaaacaagaaagagttgaagaattaatacaagttgtaaagaaagagatattatcttcaaatcatgatcaattgaagttgattgacaatctccaacgtttgggattatcacatcattttgagagtgaaatcgagaaattgttggaacaattaagtatcggcactcatcatcaaaatcatcatgatctacatgatgcttctcttcggtttagattattaagacaacatggatttaatgtttcatcaagtatatttgaaaaatttaaggacgatgaaggtaactttaagaaaagcttgataaccgatgtttcgggtttgcttagtttgtatgaggcttcacacttgagttatgttggagaaagcatactagatgaagcacttgctttcacaaccactcaccttaaggctattgtggcaaatagtaaagatcatccattatcacatcaaatatccatagccttgcataggcctctaagaaagaccatagagaggcttcatgctaggttttacatctcaatctatgaaaaggatgcctctcataacaaagtattgctagagcttgcaaagttagatttcaatctacttcaatgtttccacaaaaaggaacttagtgaaattatgaggtggtggaaggagcatgagtttgtaaagaaattcccttttgcaagagataggatggtggaactgtatttttggatattgaatgtatattatgaacccaaatactctcgagcaagaaagcttttgaccaaagtcattgcattgacctcaatcactgatgatacttatgatgcatatggtactattgatgagcttgagcttcttaccaaagcaattcaaaggtgggacataaattgtctggataaacttgagccagaatatttaaagacatattataaggtaatgttggattcttatgaagaatttgaaaaggagcttaaaaaggaagaattatacaaactcgagtatgcaaaagaagagatgaaaagaattattagagcttattttgaagaagctcgatggttgaatgaaggatatttcccaagcttcgatgagcatttgagagtttcatatgtttcttgtggttacattttgttgatagccacaagttatgttggaatgtatgatattgtaacacatgaaactctagattggctctctaaagaccctaagattatttcagcttccactctcctatcaagattcatggatgacataggctctcgcaagtttgagcaacagagaaatcacataccatctacagttgattgttacatgaaacaatatggagtatcagaagaagaggcaattaaagaacttaataaaagagtggtcacctactggaaggaaatcaatgaagactttattaggccaactgttgtgccttttcctatcttacttcgtgttcttaattttacaaaagtagcagatcttctttacaaagagggcgatgatcaatacacaaatgttggaaaagtgctcaaagaaagcattgctgctttacttatagattcaatcccattataa

SEQ ID NO: 64 - DNA, 1656 bp, Artificial sequence
  Terpene Synthase Gene Nucleic acid sequence of the 45 identified gene products
atgtcaaatattcaagtcttagcttcatctcaattatgtgacaaaattattgctcgtccaacaataaaatttcacccttctatttggggtgatcgattcctccattacaatatttcagaacaagacttggtttgcaaacaagaaagagttgaagaattaatacaagttgtaaagaaagagatattatcttcaaatcatgatcaattgaagttgattgacaatctccaacgtttgggattatcatatcatttcgagagtgaaatcgagaaattattggaactattaagtatcggcactcatcatcaaaataataatctacatgatgtttctcttcggtttagactattaagacaaagtggatttaaggtttcatcaagtatatttgaaaaattcaaagacgagaaaggtaactttaaagaaagcctaataaccgatgttccaggtttgcttagcttgtatgaggcttcgcacttgagttatgttggagaaagcatactagatgaagcacttgctttcacaaccactcaccttaaggctattgtggcaaatagtaaaaatcatccattatcacatcaaatatccatagccttggaaaggcctctaagaaagaccatagagaggcttcatgctaggttttacatctcaatctatgaaaaggatgcctctcataacaaactattgctagagcttgcaaagttagacttcaatgtacttcaatgtttccacaaaaaggaacttagtgaaattatgaggtggtggaaggagcatgagtttgtaaagaaattcccttttgcaagagataggatggtggaactatatttttggatattgggtgtatattatgaacccaaatactctcgagcaagaaagcttttgaccaaagtcattgcattgacctcaatcactgatgatacttatgatgcatatggtactattgatgagcttgagcttcttaccaaagcaattcaaaggtgggacataaattgtatggataaacttgagccagaatatttaaagacatattataaggtaatgttggattcttatgaagaatttgaaaaggagcttaaaaaggaagaattatacaaactcgagtatgcaaaagaagagatgaaaagaactattggaggttattttgaagaagctcgatggttgaatgaaggatatttcccaagcttcgatgagcatttgagagtttcatatgtttcttctgctaacgttttgttgatagccacaagttttgtaggaatgcatgatattgtaacacatgaaactctagattggctctccaaacaccctaacattgtttcagcttccactctcctctcaagattcatggatgacataggctctcgcaagtttgagcaagagagaaatcacataccatctacagtggattgttacatgaaacaatatggagtatcagaagaagaggcaattaaagaacttaataaaagagtgatcacccactggaaagaaattaatgaagactttattaggccaactgttgtgccttttcctatcttagttcgtgttcttaattttacaaaagtaatagatcttttttacaaagagggtgatgatcaatacacacgtgttggaaaagcgctcaaagaaagcattgatgctttgcttatagattcaatcccattataa

SEQ ID NO: 65 - DNA, 1671 bp, Artificial sequence
  Terpene Synthase Gene Nucleic acid sequence of the 45 identified gene products
atgtcatatcaagttttagcctcatcacaaaatgacaaagtatcaaaaattgttcgtccaacaacaacttatcaaccttctatttggggggagagatttctccaatatagtatttcagaccaagactttagctataaaaagcagcgagttgacgaattaaaggaagtggtaaggagagaggtatttttagaatgttatgataatgtttcatatgtgttgaagatagtggatgatgttcaacgtttgggattgtcgtatcattttgaaaatgaaatagaaaaagcgctacaacacatttacgataacactattcatcaaaaccacaaagatgaagatttacatgacacttctacccgctttagactattgcgccaacatggatttatggtttcatctaatatatttaaaatatttaaagatgagcaagggaattttaaggagtgcttgataactgacattcttggtttgctgagcttatatgaggcctcacatttaagctatattggcgagaatatattaaatgaagcacttgctttcaccaccactcaccttcatcagtttgtgaaaaatgaaaaaacacatccattatcaaatgaagtattactagccttgcagagacctataagaaagagcctagagaggctccacgccaggcattacatttcatcttacgaaaacaagatttctcataacaaaacattgctagaacttgcaaagttggatttcaatctattacaatgtttgcatagaaaagagcttagtcaaatttccaggtggtggaaagaaatagactttgtacacaaactaccttttgcaagagataggattgtggagctatacctttggctattaggagtttttcatgaacctgaattgtcactggcaagaattatttcaacaaaagttattgcattggcctcagttgcagatgatatttatgatgcatatggtacatttgaagagcttgagctccttactgaatcaattaataggtgggacttaaattgtgcggatcaacttcgtccagaatgtttacagacattttataaggttcttttaaattgttatgaagaatttgagagtgagcttggaaaggaggaaagttacaaagtttactacgcaagagaagcgatgaaaagattacttggagcatatttcagtgaagctcgatggttgcacgaaggatatttccctagcttcgatgagcatttgaaggtttctttgatttcttgtggatacaccatgatgatagtgacctctttaattggcatgaaagattgtgtaacaaagcaagattttgagtggctctcaaaagaccccaagataatgagagattgcaatatcctttgtaggttcatggatgacatagtctctcataagtttgagcaacaaagagatcattcaccgtctaccgttgagagttacatgaggcaatatggggtgtcagaacaagaggcatgtgatgagctaagaaagcaagtgattaattcatggaaagaaataaacaaagcattcctcaggccttctaatgtgccttatccagttttatctcttgttctcaatttttcgagagtaatggatcttctctacaaagatggtgatggctatacgcatattggaaaagagacaaaaaatagtgttgttgcgttacttatagatcaaatcccatga

SEQ ID NO: 66 - DNA, 1689 bp, Artificial sequence
  Terpene Synthase Gene Nucleic acid sequence of the 45 identified gene products
atgttcacacaaatcttagtatcatcatcttcaaatgacaacccaaatataattgttcgtcctacaaaaaaattccacccaaatatttggggagaacgattcttacattacaacatttcacaacaagatttgtattgtcaacaacaaaaggttgagaaattaaaagaagtggttagaagagaaatatttggagattattattatgatgcttggaaaaatcaattgaagataattgatgtggtagaacgtttgggattgtcttatcattttgaaactgaaatagaaaataagcttcaatgcatttacaacaaaaccaatattgatgatgaagatttacaccatgtttctattcgatttagacttctacggcaacatggatttagaatttcttctgatatatttgaaaaattcaaagatgaggatgggaactttaaaaaatgcttggtaagtgatacccttggtttgcttagcttatatgaagcctcacatttgagctgtgttggagaaaatatacttgatgaagcacttgctttcacaacaacacacctaaatgagtttttggtgaagaaaaaagaacaccatgaagatgatgatccattatcgaaagaaatatctcgagccctagagaggcccttaagaaagaccctagtaaatcttcatgcaaggcatttcatttcgatatatgaaaaagatgcctcacataacaaagtattgttacaacttgcaaaattagattttaatctattacaatgcatgcacaaaaaggagcttagtgaagtcagcaggtggtggaaagaatcagattttgtacacaaatttccatttgcaagagataggattgtggaattgtacctttggatattaggagtttattatgaaccccaatactgtttggcaagaaatattctagtcaaaatcatagctttggcctcaattgctgatgatatttatgatgcatatggtacacttgaagaacttgagatcctaactcatgcaattgaaaggtgggatataaattgtgtagataaactgaatcaggaatatatgcaaacattttataaagattgtttgaattgttatgaagagtttgagcaactgctagaaaaagaagaaacatacagagttcattatgcaaaagaagcgtttaagggattagttcaatctcatttgaatgaagctcgatgtttgcatagaggatacatcccaagttttgaagagtacttgaaatttgctttgggtaattgtggttactacatgttgatactaagctctttggttggaatgaaaactaatattgtaacaaaagaagtttttgagtggctctcgaaagatcgaaagattattagagcatctgttactatttgtaggctaatggatgacatagccgaacacaagtttgaggaagatgattatgaggaacattcagcagtggaatgctatatgattgaacatggcgtttgtgaagaggaagcctatgatgaactgaataagctaataatgaatgcatggaaagaaataaatgaagagtttttgaagcctactaaagtagcttcacctatattacttcgtgctcttaacttttcaagggttatggatcttattttcaaatttggagatggttatacacacgttggaaaaatcaccaaagatattgttgctgctttgcttattcatccaatttcattataa

SEQ ID NO: 67 - DNA, 1689 bp, Artificial sequence
  Terpene Synthase Gene Nucleic acid sequence of the 45 identified gene products
atgtccactcaaatcttagcatcatcatcttcaaatgacaacccaaataaaattgttcgtcctacaaaatcatttcatccacatatttggggagaacgattcttacattacaacatttcacaacaagatttgtattgtcaacaacaaaaggttgaggaattaaaagaagtgattagaagagaaatatttggagaatcatgttatgataatgtttcatatgtgttgaagataattgatgtggtagaacgtttgggattgtcttatcattttgaatctgaaatagaaaataagcttcaatgcatttacaacaaaaccaatattgatgatgaagatttacaccatgtttctttacggtttagacttctacgacaacatggatttagaatttcttcggatatatttgaaaaattcaaagacgaggatgggaactttaaaaaatgcttggtaagtgatacccttggtttgcttagcttatatgaggctacacatttgagttgtgttggagaaaatatacttgatgaagcacttgctttcacaacaacacacttaaccgagtttttggcaaggaaaaaagaataccatgatgacgatgatccattatcaaaagaaatatctcgagccctagagaggcccttaagaaagaccctagtgaatcttcatgcaaggcatttcatttcgatatatgaaaaagatgattcacataacaaagtattgttacaacttgcaaaattagatttcaatctattacaatgcatgcacaaaaaggagcttagtgaagtcagcaggtggtggaaagaatcagattttgtacacaaatttccatttgcaagagataggattgtggaattgtacctttggatattaggagtttattatgaaccccgatactgtttggcaagaaatattttagtcaaaatcatagctttggcctcaattgctgatgatatttatgatgcatatggtacacttgaagaacttgagctcctaactcatgcaattgaaaggtgggatataaattgtgtggatacactgaatcaagaatatatgcaaacattttataaggatgttttgaattgttatgaagagtttgagcaagtgctagaaaaagaagaacaatacaaagttcattatgcaaaagaagcgtttaagggattagtccgatctcatttggatgaagctcgatgtttgcatagaggactcatcccaagttttgaagagtacttgaaatttgctttggataattgtggttactacatgttgatactaagctctttggttggaatgaaaactaatattgtaacaaaagatgtttttgagtggctctccaaagatcgcaagattattagagcatctgttactatttgtaggctcatggatgacatagctgaacacaagtttgaggaagatgattatgaggaacattcagcagtggaatgctatatgattgaacatggcgtttgtgaagaggaagcctatgatgaactgaataagctaataactaatgcatggaaagaaataaatgaagaatttttgaagccaactaaagtagcttcacctatattacttcgtgctcttaacttttcaagggttatggatcttattttcaaatttggagatggttatacacacgttggaaaaatcactaaagatattgttgctgctttgcttattcatccaatttcattataa

SEQ ID NO: 68 - DNA, 1686 bp, Artificial sequence
  Terpene Synthase Gene Nucleic acid sequence of the 45 identified gene products
atgtcttcgagtgataataataataatatgaatcgtcctaattctatcccattttctccaagcatttggaaagattatctcatgtcaaatgtttccaataactctcttatggatatgaaggaaaataatgatgatagtgaaatagttattctgaagaaagaagtgaagaagaaaatagttgagcttgactatgttgaaaacccattagagacacttgaatttattgattcaattcaacgattgggagtgtcgtactattttgaaaatcaaattgaagtagttttgaagaacatatgtaacaaatttcacgaggaaaataatgacgacgatgatctctatgttgttgctcttcgatttcgattggttagacaacaaggttattatatgtcatgtgacgtgttcaataagttcacgaacaacgaagggaaatttgaagagtcactttgtaacgatattcgaggaatgttaagcttatatgaagcgtcacaactaagagtgcatggagagaaaatactagatgatgccctaatattcacaacaaatcacctcgaatctgcagctaaaacctcgaaattgagctctcatatttcaaaccaagtaaatcacgcgttgaaaaaccctattcgaaagagcttgcaaaggagacaagcaagacattacatgtctttataccatcaaatctcttctcacaatgagcatcttctagctctagctatactagatttcaacttgctacaaaaactttaccagaaggaattaagtgatctcacaaggtggtggaaggagtttgattatgaaagaaggcaatcgttctctagagaaagaataatggattgttacttttggacttttggagtgttttttgaggctgaaacctcacatattaggttgctgatgagcaagttgattgctttgctcactcttgttgatgatatttatgataactttgggactcttcaagagctacacctcttaactgaagcaatacaaaggtgggatatgtgtttgattgatcaactaccagagtacattcaaccatgttacaaggaaatcttgaatctttacactgaaattggagaatttactaaggacaaatcatattgccttagctacgctaagaaaggattccaagagctagtaaaagggtactttgaggaagccaaatggttacaccaaaaacataatccaacactagatgagtatatgccaattgcacttgttactgctgcttctcctctactcattgctatttcattcattggaatgccaaatgttgttacaaaagattctatgaattggatcttttctcatccacaacctaaaagtgtgcggactctgtcgatcgttggtagagttcttaacgacattggcttctaccagtggagggaaaggagaacagagaaagtagatttttcagctgtggattgttatataaaaaaatatggtgtggaagaagaagaagcaatacaaagacttaaagaacaagttagtgattcatggaaagatctgaatgaagagtgtctctatcccaacaatatgaatatcccaatgccacttctaatgagagttcttgatcttgtacggatgaataatgaattatacagagaaggagatggttttacaagagaagctttcatcaaagatttgattgattctctcatcatcaatccctacatccaacaataa

SEQ ID NO: 69 - DNA, 1644 bp, Artificial sequence
  Terpene Synthase Gene Nucleic acid sequence of the 45 identified gene products
accatttggggtgattatttcatgtcttctgcttcaaatcatcatcactcatctcttatggaaactatggagaataataacaaagagagttatgagaagattattgagatgaaggaacaagtgaagaataaattacttcatggtcttcatcctttggaaaaccctttggagacacttgaatatattgatgatattcaacgattggggttgtcttattattttgaaaatgaaattgaacaaaatttggagcaatttcataataattatcaaaatctaattgattttggtgataataacctttatgctgatgctctttgctttcggttgcttaggcaacaaggttataatattgcatgtgacatattcgacaagtacaagaatgaaaaaggaaaatttaaagaatcaatttcgagtgacattcgaggaatgttgaacttgtatgaagctgcacaaatgagagttcatggagagaaaatactagacgaagcacttatctttacaactactcatcttgaatcctcagttaaaacatgtcaattgagctctccttatctagacctagtgaaacatgccctaatgcaccctattcgaaagagcttacaaagaagagaggcaagactttacatatcactttatcatcaactaccttctcatgaggagattcttttaacacttgctaaattagatttcaacttgcttcaaaaactacatcaaaaggaactaagttacataacgaggtggtggaaggagtttgattacaaaagtaagcattcatttataaaagacagaatagtggagtgctatttctgggtttatggagtgttttttgaggcagaaacttcccaaatcagactaataatcaccaaattaattgctattctcacaataattgatgatgcttatgatagctttggtacacttgaagaactagagccttttactcaagcaatagaaaggtgggatatatgtgccatagatactctgcctgagtacatgaaaatattttacatgaaacttttggagatctacaatgaaattgaacaattttctaaggaaagatcatactgccctagctatgctaagaaaggggtgcaatctctaattagagcttattttaaggaagccaaatggttacacacaaaatatataccaacattagatgaatatatgccagttggggttgatagtgcaggatcttttatgctcatttcaatggtttttattggaatgggagatattgttacaaaacattctatggattggatattttctaatcctcagcctaaaattatacaaactatggcaatagttggaagagttatgaatgacattggataccataagtcggagcgaaagaaatcatcaggagaaattgtggcttcaactgtggagtgttacatgaaacaatatggcgtgactggtgaagaagctatagagaaacttagcgaacaagttaaagattcatggaaagatctcaatgaagatcttctcaatccaatcactatccctaggccactcttaatgcaagttctaaagcttgtacgagtgaaccatgagatttatagagaaggagatggctttacacaacccactttgctcaagaatttgattcattctctcataatcaatccaattgacttttga

SEQ ID NO: 70 - DNA, 1698 bp, Artificial sequence
  Terpene Synthase Gene Nucleic acid sequence of the 45 identified gene products
atgactttaattagtagtgatgaaaaacgccctaatcttgcagagtttactccaagcatttggggagattatttcatgtcttgtgcttcaaatgatgatcactcatcccttaaagaaactatggaaaataacaaagagagttatgtgaagattattgagctgaaggaacaagtgaagaagaaattacttcatggtcttcatcctttggaaaatcctttagagacacttgaatatattgatgatattcaacgattggggttatcttattattttgaaaatgaaattgaacaagttttgaagcaatttcataataataataacaatcttcatcgtgattttggtgataataacctttatgctgatgctcttcgctttcggttgcttagggaacaaggctattttatagcatgtgaggtatttgccaaatataagaatgagaaaggaaaatttaaggaatcaatttcgagtgacattcgaggaatgttgaacttgtatgaagcttcacaaatgagagttcgcagagaagaaatactagatgaagctcttatcttcacaactactcatcttcagtccttagtggaaacatctcaattgagctctccttatctagacctagtgaaacatgccctaatgcaccctatccgaaagagctttcaaagaagagaggcaagactttacatatcactttaccgtaaactaccttctcacgaagagcttcttttaaccctcgccaaactagatttcaacttgcttcaacaactacatcaaaaggaattgaattatattacgaggtggtggaaggagtttgacttcaaaagtaagcaatctttttcaagagacagaatagtggagtgttacatttggaattatggagtatattttgaagctcaaacttcccaaattaggttgatgatgaccaagttgatttctttgcttactattattgatgattcttatgatagctatggtacacttgaagagctaaggccttttactgaagcatggatgttagaaaggtgggatatatctgctactgacaacttgccagagtacatgaaagtatgttacaaaaaatgtttagaatttttcaatgaaattgaagaatttacaaaggaaaattcatactgcgcgagttatattaagaaagggttgcaatgtatggttagagcttatagtaaggaagtccaatggttacacaataaatatatgccaacatttgatgaatattatccaattggacttgataatgctggatctgaagagctaatatcaatggccttttgtggaatgggagatgttgtaacaaaagaatctatggattggatattttctcagccccaacctaagattatacgaactatgtcaattgttggaagacttatgaatgacattggctacaagtcggatcgaagaaaattatcaaaagatgtagtggcttccgctgtggagtgttacatcaaacaatatggtgtaacagatgaagaagctatagagaaacttaacgaacaagttaatgattcatggaaggatctcaatgaagatcttctctatccaatcgctattcctagaccactcttaatgagagttctcaatcttgtacgagtgaaccatgagatgtacagagaaggtgacggttttacacaaccaacattgctcaagaatttgattgatactctcatcatcaatcccatacattaa

SEQ ID NO: 71 - DNA, 1695 bp, Artificial sequence
  Terpene Synthase Gene Nucleic acid sequence of the 45 identified gene products
atgactttaattagtagtgatgaaaaacgccctaatcttgcagagtttactccaagcatttgggaggattatttcatgtcttgtgcttcaaatgatgatcactcatcccttaaagaaactatggaaaataacaaagagagttatgtgaagattattgagctgaaggaacaagtgaagaagaaattacttcatggtcttcatcctttggaaaatcctttagagacacttgaatatattgatgatattcaacgattggggttatcttattattttgaaaatgaaattgaacaagttttgaagcaatttcataataataacaatcttcatcgtgattttggtgataataacctttatgctgatgctcttcgctttcggttgcttagggaacaaggttataatatagcatgtgaggtatttgccaaatataagaatgagaaaggaaaatttaaggaatcaatttcgagtgacattcgaggaatgttgaacttgtatgaagcttcacaaatgagagttcgcagagaagaaatactagatgaagctcttatcttcacaactactcatcttcagtccttagtggaaacatcccaattgagctctccttatttagacctagtgaaacatgccctaatgcaccctatccgaaagagctttcaaagaagagaggcaagactttacatattactttaccacaaactaccttctcacgagcttcttttaaccctcgccaaactagatttcaacttgtttcaacaactacatcaaaaggaattgaattatattacgaggtggtggaaggagtttgacttcaaaagtaagcaatctttttcaagagacagaatagtggagtgttacatttggaattatggagtatattttgaagctcaaacttcccaaattaggttgatgatgaccaagttgatttctttgcttactattattgatgattcttatgatagctatggtacacttgaagagctaaggccttttactgaagcatggatgttagaaaggtgggatatatctgctactgaaaatttaccagagtacatgaaagtatgttacaagaaatttttagaatttttcaatgaaattgaagaatttacaaaggaaaatccatactgtgcgagctatgttaagaaagggttgcaatgtatggttagagcttatagtaaggaagtccaatggttacacaataaatatatgccaacatttgatgaatattatccaattggacttgataatgctggatctgatgagctaatatcaatggccttttgtggaatgaaagatgttgtaacaaaagaatctatggattggatattttctcagccccaacctaaaattatacgaactatgtcaattgttggaagacttatgaatgacattggctaccacaagtcggatcgaagaaaattatcaaaagatgtagtggcttctgctgtggagtgttacatcaaacaatatggtgtaacagatgaagaagctataaagaaacttaacgaacaagttaatgattcatggaaggatctcaatgaagatcttctctatccaatcgctattcctagaccactcttaatgagagttctcaatcttgtacgagtgaaccatgagatgtacagagaaggtgacggttttacacaaccaacattgctcaagaatttgattgatactctcatcatcaatcccatacattaa

SEQ ID NO: 72 - DNA, 1671 bp, Artificial sequence
  Terpene Synthase Gene Nucleic acid sequence of the 45 identified gene products
atgtcaaatcaagtcttggcttcatctcaattaggtgaaaaaattcttgctcgaccaacaacaaattttcacccttctatttggggcgaccgattcctccattacaatatttcagaacaagactcggtttgtaaacaacaaagagttgaagaattaatacaagttgtaaggaaagagatattatcttcaaatcatgatcaattgaagttaattgacaatctccaacgtttgggattatcatatcattttgaaagtgaaattgagaaattgttggaacaattaagtaccactcatcatcaaaatcatcatgatcttcatgatgcttctctttgctttagattattaagacaacatggatttaatgtttcatcaagtatatttgaaaaatttaaggacgatgaaggtaactttaagagaagcttgataaccgatgtttcgggtttacttagcttgtatgaggcttcacacttgagttatgttggagaaagcatactagatgaagcacttgctttcacaaccactcaccttaaggctattgtggcaaataataaagatcatccattatcacatcaaatatccatagccttgcataggcctctaagaaagaccatagagaggcttcatgctaggttttacatctcaatctatgaaaaggatgcctctcataacaaaatattgctggagcttgcaaagttagatttcaatctacttcaatgtttccacaaaaaggaacttagtgaaattatgaggtggtggaaagaacatgactttgcaaacaaattcccttttgcaagggatagaatggtggaattgtatttttggatattgggtgtatattttgagccgaaatactctcgagcaagaaaacttttagccaaagtcattgccttcgcctcaatcattgatgatatttatgatgcatatggtacaattgatgagcttgagcttcttaccaaagcaattgaaaggtgggatataagctgtatagataaacttgagccagaatatgtgaaaacatattataaggcaatgttggaatcttatgaagagtttgaaaaagtagagcttaaaaatgaagaattatacaaacttcaatatgcaaaacaagagatgaaaagattgattgaatctcattttgaagaagctaaatggttgaaccaaagatatttcccaagctttgatgagcatatgagagtatcctatgtttcttgtggtaacacaatgttgatatccaaagatcacaattttgttggaatggataatgatattgtaacaatcgaaactcttcaatggctttccaatgaccctaaaattgtgaaagcttccactctcctttccagattcatggatgatataggttctcgaaagtttgaacaagaaagaaatcacataccatcatcagtggaatgttacattaagcaatacgaagtatccgaagaagatgcacttgaagaactcaataaaagagttgaaaatcattggaaagaaatcaatcaagattttattaggccaactattgtgccttttcctatcttagttcgcgttcttaattttacaagggtaatggatcttatctacaaagagggtgatgatcaatatacaaatgttacaaatgttggaaaagtgaaagaaagcatttctgctttgcttatagatccaatcccattataa

SEQ ID NO: 73 - DNA, 1713 bp, Artificial sequence
  Terpene Synthase Gene Nucleic acid sequence of the 45 identified gene products
atgtcaaatattcaacatcaaatcttattatctttgtctcaaaataataataataataatgagaaaattattatacacaaaaatgttgttgttcgaccaacaacaaaatttcacccttctatttggggagatcgattcctccattacaatgcatcacaacaagacttggaatgcaaagaacaacgagtgaaggaattagttgaagttgtgaggaaagagatattatcttcaaatcatgatcaattgaagttaattgatagtgttcaacgtttgggattatcacaccattttgagactgaaatagaacaaatgttggaaaggctttaccaatattattatcattattctactacaaaacatgatcatcatctacatcatcattctattatgtttagactatttaagacaacatggtttaaggtttcatcaagcatatttgaaaaattcaaagacgagaaaggtaattttaagaaaagcttgataaccgatgtttcgggtttgcttagtttgtatgaggcttcctacttgagttatgttggagaaagcatactagatgaagcacttgctttcacaaccactcaccttaaggctattgtggcaaatagtaaagatcatccattatcacatcaaatatccaaagcattggaaaggccattaagaaagaccatagagaggcttcatgctaggttttatatctcaatctatgaaaaggatgcctctcataacaaagtattgctagaacttgcaaagttagatttcaatctacttcaatgtttccacaaaatggagcttagcgaaattatgaggtggtggaaaaagcatgactttgcaaacaaattcccttttgcaagagataggatggtggaactatatttttggatgttgggtatatattatgaacccaaatactctcgagcaagaaagctaacaaccaaaatctctgctttgatttcaatcacagatgatatatatgatgcatatggtacaattgatgagcttgagcttcttacccaagccattgataggtgggacatagattttatagataaacttgaaccagaatatttgaagacatattataaagcaatgttgacttcttatgaagaatttgaaaaagagtttacaaaggaagaattatacaaacatcaatatgcaaaagaagagatgaaaaaattgattcgagcttatttagaagaagctcgatggttgaacgatggatacttgccaagcttcgatgagcatttgaaagtttcttatgtttcttgtgcttacacaacgttaatcgccacaagttatgtaggaatgcatgatattgtaacacatgaaactctaaattggctctccaaagaccctaaaattgtttcggcttcgactctacttgctaggttcatggatgatattggttctcgcaagtttgagcaagagagaaatcacataccatctacagtggaatgttacatgaagcaatatggggtatcagaaaaagaggcaattgaagaactgaataaaagagtggtcaattattggaaagaaattaatgaagacttcattaggccaactgttatgcctttccctatcttagttcgtgttcttaatgttacaaaagtattggatcttctttacaaaaatggtgatgatcaatatacacatgttggaaaagtgtttaaagaaagcattgctgctttacttatagatccaatccctgtactataa

SEQ ID NO: 74 - DNA, 1716 bp, Artificial sequence
  Terpene Synthase Gene Nucleic acid sequence of the 45 identified gene products
atgtctagtcaagtgttagcttcatctcaaaaaaatgacaaaacacaaaacatcattcgaccaacaacaaaatttcacccaccaatttggggagatcgattcctccattacaatatttcagaacaagagttggaatataaagagggacaagttgaagaattgaaagaagttgttaggaaagagatattccatggaaataataaaagaaatattattaatgtttcgaaacaattaaagttaattgatgatgtggaacgtttgggattatcttatcattttgaaagtgaaatagaaaaaaagctacaacacatttatgaaattactaccaataatattgatcatcaagatcaacactactactactccaaccatgatgaagatctacatgatgtctctattcgatttagattactacgacaacatggatttaacatttcatctaatatatttgagaaattcaaagatgagagtggtaagtttaaggaaagcttgaaaagtgacattgaaggtatgcttagcttgtatgaagcttcatacttgagctatgttgaagaaaatatactagatgaggctcttgctttcactaccaccaatcttaagttagtggccaacaaaaaagaacatccattatcacatgaaatatccttagccttatataggcctttgagaaaaaccctagtgaggctttatgctaggcattacatttcaatctatgagaaacaaccttctcataacaaagtattgctacaatttgcaaagttggacttcaatctactacaatctttgcataagaaggagcttagtgaaatttccaggtggtggaaagaattagacttggcaaacaaactaccatttgcaagaaataggattgtggagctatacctttggatactaggagtctttcatgaacctcaattctctcttgcaagaaaaatcttaattaaagccatttcaatggcctcagttgcagatgatatttatgatgcatatggtacatttgaagaacttgagctcctcaccgaagcaattctcaggtgggacataagttttatagataaacttagtccagattatttgaagacatattataaggtatttttgaattcttatgaagaatgtgaaaaagatcttaaaaaggaagagagatacaaacttcactatgcaaaagaatcgatgaaaaaattaatacaagcttatttccatgaagcacaatggttgaaccaaggacatttcccaagctttgatgagcatttgaaagtttcttttgtgtcttctggttacccaatgttgattgagacctcttttgttggaatgcaagatgttaaaacaaatcaagtatttgaatggctctctacacaaccaaagatttttagagcttgcactatcatttctagattcatggatgacctagtttctcgtaagttcgagcaagagaggaatcacgtaccatctacagtagattgctacatgaagcaatatggtgtatcggaacaagaggcatgtgatgagctcaataaacaagtggttaatctatggaaagaaataaaccaagagtttcttaggccaacttctatgccttcatctatcttagttagaattcttaatttcacaaaagtgcttgacattatctacaaagaaggtgatggctatacacatgttggaaaattggttaaggacagtgttgctgcgttgcttatagatcccatcccattatag

SEQ ID NO: 75 - DNA, 1719 bp, Artificial sequence
  Terpene Synthase Gene Nucleic acid sequence of the 45 identified gene products
atgattacaggagtaatctccagtagtactacaatattcaaagaacaaccggaagcaattgtccgacgatcaggaaactacaaacccacgttgtgggatgctcattttttcaaatcactccaagtcatatatacggaggaaagctatgggaaaagaatcaatgagctgaaagaagatgtgagaagaattcttgagaaggaggctgagaatcctttagttaaacttgaacagatcaatgatttgagcagacttggaatatcttatcactttgaagatcaaattaagacaatattaaacctgacatttaacaataataatgcattgtggaagaaagataatctgtatgccactgctcttcatttcaaactccttagacaatatggattcaatcctgtatcttcagaggttttcaatgccttcaaagaccagaaaaaagagttcaaagaaagtttgagtaaggatgtgaaaggaatggtatgtctatatgaggcttcattctattcatttaggggtgaacccatattagatgaagcaagagacttcacaaccaaacatctgaaacaatacttgatgacgaggcaatgtcaaactaaatctgttgaccatgatgatgatcatgatcttgtgaaacttgtggagcatgccttggatcttccactccattggagattgccaagattggaggctaggtggttcattgatatgtatgctgaaaggaattatgatatgaatccaacttttcttgacttcgctaaacttgactataacttcgttcagtcagcataccaaaaagagctcaaatatatttcaaggtggtggagtggttctaggttgacagaaaggctaccatttgctagagacagagtagtggaaattttctattctgcagtggcattaaaatatgaggcagaatttggatttgttagaactgtgatgacaaaaattggtctcttgctaacactcatggacgatatatatgatgtgtatggtacactagatgagcttcagctttttctaggggcaattgagaggtggaatataaatgaattggatcagctacccgattacatgaagatattgtttgttgctttttataacaatgtgaatgagatatcttattatgtccttaaagaaaatgggattcacatcatcaaatatctgaagaaagcgttgggggatctgtgtaaatgctatatggaggaggcaaaatggtttcacagtggacacataccaagtttagaagaattcattgagaatggatggaaatcaattacaatacctctttgtcttatctatcattattgcttaattacaacttcaattacagaacaagacatggaacacttgcttcaatatccaactattttacgtgtctcaggaactgtctttcgatttatagatgatttgggaacctcatcagatgaacttgaaagaggagataatccttcatcaattcaatgctacatgcgtgaaaagggtgttagtgaaaatgaaagccgtgaacacatatggaatttaataagtgaaggatggaaggaaattaatgaagtcaaagcttcaaactctccatactctcaagtgtttattgaatctgccattgattttgttagaggagcaatggagatgtatcacaagggtgatggttttggtactaatcaagaccgatatcttaagaccaaagttgtcaacatgttcttcgatccaattccaatttaataa

SEQ ID NO: 76 - DNA, 1719 bp, Artificial sequence
  Terpene Synthase Gene Nucleic acid sequence of the 45 identified gene products
atgattacaggagtaatctccagtagtagtactccaatattcaaagatcaaccagcagcaattgtccggcgatcaggcaactacaaacccacattgtgggatgctcattttttcaattcactccaagtcatatatacggaggaaagctatgggaaaagaatcaatgagctgaaagaagatgtgagaagaattcttgagaaggaggctgaaaatcctttagttaagcttgaacagatcaatgatttgagcagacttggaatatcttatcactttgaaaatcaaattaaaacaatattaaacctgacatttaacaataataatgcattgtggaagaaagataatctgtatgccactgctcttcatttcaaactccttagacaatatggattcagtcctgtatcttcagaggttttcaatgtcttcaaagacgagaaaaatgagttcaaggagaatttaagtaaggatgtgaaaggaatggtatgtctatatgaggcttcattctattcatttaggggtgaacccatattagatgaagcaagagatttcacaaccaaacatctcaaacaatacttgatgacgaggcaatgtcaaactaaatctgttgaccatgatgatgatgatgatcttgtgaaacttgtggagcatgccttggatcttccactccattggagattgccaagattggaggctaggtggtttattgatatgtatgctgaaaggaattatgatatgaatccaacttttcttgactttgctaaacttgactataacttcgttcagtcagcataccaaaaagagctcaaatatatttcaaggtggtggagtggttctagattgacagaaaggctaccatttgctagagacagagtagtggaaattttctattctgcagtggcactaaaatatgaggcagaatttgggtttgttagaactgtgatgacaaaaattggtctcttgctaacactcatggacgatatatatgatgtgtatggtacactagatgagcttcagctttttctagaggcaattgagaggtggaatataaatgaactggatcagctacccgattacatgaagatattgtttgttgctttttataacaatgtgaatgagatatcttattatgtcctcaaagaaaatgggattcacaccatcaaatatctaaagaaagcgttgggtgatctgtgtaaatgctatatggaggaggcaaaatggtttcacagtggacacataccaagtttagaagaattcattgagaatggatggaaatcaattacaatacctctttgtcttatctatcattattgcttaattacaacttcaattacagaacaagacatggaacacttgcttcaatatccaaccattttacgtgtctcaggaactgtttttcgatttatagatgacttgggaacctcatcagatgaacttgaaagaggagataatccttcatcaattcaatgctacatgcgtgaaaagggtgttagtgaaaatgaaagccgtgaacacatatggaatttaataagtgaaggatggaaagaaattaatgaagttaaagcttcaacctctccatactctcaagtgtttattgaatctgccattgattttgttagaggagcaatggagatgtaccacaagggtgatggttttggtactaatcaagatcggtatcttaagaccaaagttgtcaacatgttcttcgatccaattccaatttaa

SEQ ID NO: 77 - DNA, 1728 bp, Artificial sequence
  Terpene Synthase Gene Nucleic acid sequence of the 45 identified gene products
atgattacaggagtaatctccagtagtagtactccaatattcaaagatcaaccagcagcaatcgtccgccgatcaggaaactacaaacccacattgtgggatgctcattttttccaatcactccaagtcatatatacggaggaaagctatgggaaaagaatcaatgagctgaaagaagatgtgagaagacttcttgagaaggagcgtgaaaatcctttagttaagcttgaacacatcaatgatttgagcagacttggaatatcttatcactttgaagatcaaattaagacaatattaaacctgacatttaacaataataatgcattgtggaagaaagataatttgtatgccactgctcttcatttcaaactccttcgacaatatggatttagtcatgtatcttcagagattttcaatgccttcaaaaacgagcaaaaggagttcaaagagagtttgagtaaggatgtgaaaggaatggtatgtctatatgaggcttcattctattcatttagaggtgaacccatattagatgaagcaagagacttcacaaccaaacatctcaaacaatacttgatgacaaggcaaagtcaatttactagagttgaccatcatgatgatgatgatcatgatcttgtgaaattggtaaagcatgccttggatcttccactccattggagattgccaagattggaggctaggtggtttattgatatgtatgctgaaaggaattatgatatgaatccaacttttcttgactttgctaaacttgactataacttcgttcagtcagcatatcaaaaagagctcaaatatatttcaaggtggtggagtggttctagattgacagaaaggctaccatttgctagagacagagtagtggaaattttctattctgcagtggcattgaaatatgaggcggaatttggatttgttagaactgtgatgacaaaaattggtctcttgctaacactcatggacgatatatatgatgtgtatggtacactagatgagcttcagctttttctagaggcaattgagaggtggaatataaatgaactggatcagctacccgattacatgaagatattgtttgttgctttttataacaatgtgaatgagatatcttattatgtcctcaaagaaaatgggattcacaccatcaaatatctgaagaaggcgttgggggatctgtgtaaatgctatatggaggaggcaaaatggtttcacagtggacacataccaagtttagaagaattcattgagaatggatggaattcaattacaatacctctttgtcttatttatcattattgcttaattacaacttcaattacagaacaagacatggaacacttgcttcaatatccaaccattttacgtgtctcaggaactgtttttcgatttatagatgatttgggaacctcatcagatgaacttgaaagaggagataatccttcatcaattcaatgctacatgcgtgaaaagggtgttagtgaaaatgaaagccgtgaacacatatggaatttaattagtgaaggatggaaggaaattaatgaagttaaagcttcaaactctccatactctcaagtgtttattgaatctaccattgattttgttagaggagcaatggagatgtatcacaagggtgatggttttggtactaatcaagaccgatatcttaagaccaaagttgtcaacatgttcttcgatccaattccaatttaataa

SEQ ID NO: 78 - DNA, 1656 bp, Artificial sequence
  Terpene Synthase Gene Nucleic acid sequence of the 45 identified gene products
atggcttctccctttctttatgtcccttctaaacacggcaatggattacaaagtttcacagatccgttttacatggagtatacacgtaatatacgagagatgaagaacgtaatgaacagtattattttggctgatgatgattatcgtgaacgctccatagaagctttgaacttggtcaacgctgtgcttagagtcggcattgattatcatgtccaagatgagattaaatctatccttgaaagggaacatataattttcagtgaccatattagtaaccaatattttaataatattaatcaagaccacctgtatgaggtttctcttcgtttccgattactgagacaaggaggttatgatgtctctccagatgtgtttaacgagttgatgaaggacaaaaagggaaatttcaatgttttagtggaagaagacagagagggactaagagaattgtttgaagcctcacaagtaagaatagaaggagaagaggtactagaggaagctggagtgttcagtggcgaacacctaaaagaatgggcaaatcttcatcgtcatacgagtgaagctcgaagtattcaattaacgttagaccaaccttgtcataaaagcttggccagggtcacatctccaaactttttggacagtttctcagccaacactactaccagagaccaaggctggacctggatgacccttttaaacaaactggtcacaatggacttcaaaatagttcagtctattcaccaaagggaaattgttcaagtctccaaatggtggaaagagcttggtttggcagaggagttgaaatttgctagagaccaacccctaaaatggtacctctggacagtggcaagtctaccagatccaagcttgtctgaagagaggattgaactaactaaacccatttctctcgtctacataatagatgatatttttgatgtttatgggacactagacgaactcactcttttcacagacgcagttaataattgggaaattaaagagcagttacccgactatttgaagatatgtttcaaggcacttgatgatataaccaacaaaattagctacgtggtgtacagaaaacatggatggaacccaattgactccttaagaaaatcgtggggaaaactgtgcaatgcgttcttgttagaagcagagtggtttggttgtgggaagttgccaaatgaagaggagtatttgaagaacgcgattgtgagttctggtgtacacgtggtgctagttcatatgttctttctcttaggtgaaggtatatccatggaagctgtaaacttactggacaacattccaggccttgtgtcttctacagcagcaattcttcgtctttgggatgacttaggaagtgccaaggatgagaatcaaaatgggcatgatgggtcttacgttgagtgctacatgaaaagacacaaagagtgttcaatgggcgaagcaagggagcaagtgattcgtatgattaaaaatgagtgggaacgcctcaataaggagtgtttctcgtcaaaacattttcccatgtgcttcagaaagggttgtcttaatgctgctaggatggttccagtgatgtatgactatgatgatcatcatcgccttccaggcctccagaattatatcaactcacttctctctcatcaaacaatataa

SEQ ID NO: 79 - DNA, 1662 bp, Artificial sequence
  Terpene Synthase Gene Nucleic acid sequence of the 45 identified gene products
atggcgttgtcaataatgtcttcttacgcatcttttcgtccctttaaaccctcctcatcactttcgagttctcaaaacataattagaaattttgacgagaactccaaatatcatatcaggagtaacggtgatctcacaccacaaaaggatttagataaatacagggacgttttaagaaaagcagacccatttgatgaaggtctgaagatgattgatgctattcaacggctaggaattgactatatcttcgaggaagagattgataaaattatacaaagccagtctgcttataagttttttagagaattcgaacatgatcatcatcatcaagatctgtatgatgtagctcttcgttttcgactcttgagacaacacggtctcttcgttcctgctgatattttcaacaagtacaaggacaataataacggttgtttcgacacgaggctaagagaggacatcaagggtttgctgagcttatatgaagcctcccatctatgcatagagggagaaaatatccttgatgaagctgctttatttagtgctcaacacttggaagcgtccatgacacgtcttcatcgttatgatcaatatcaggccaaatttgtggcaactacacttcaaaatcccactcacaaaagtttatccaagttcacagccaaggacctttttggtgtctatcccagtgagaatgggtacataaatttgtttcaacaactagcaaaagttgaatttaatagagttcagtccctgcatagaatggaaattgatcaagtcaccaggtggtggcgagacattggtttagctaaggaattaactttcgcaagagatcaaccggtgaagtggtatatttggtccatggcctgcctaaccgatccaaccttgtcgaaacaaagggttgcgcttacaaaatccatttcgtttatctatgtaatagatgatattttcgacatgtacagttcacttgatgaactcattctcttcacccaggctgtctctagctgggaatatagtgctatacaaaaacttccagactccatgaagacatgctttagagccctagataatatgatcaatgagtctagccatacgatctatcaaaagcgtggatggagccctttacactctcttcggaagacgtgggcaagtttgtgcgaagcctttttagtagaggcaaaatggtttgcatcaaggcacgtaccaaaggcaaaagaatacttggaaaatggtgtggtcagctcaggagtgcacgtagttctggttcatatatttgttctcttggatgaaaccagtctcacccaaaagacactggattttgtggaaaacatgccttccatcattacttctacagcatcgattcttaggctttgggatgactttggtagtgccaaggatgagaatcaagaaggacatgacggatcttatgtggagtgttacatgaaggaattaggaggcagtgttgaagatgcacgtgaggaaatgatggaaaagatttcagatgcatggaagtgcctcaataaagaatgcatacttcgaaatccagcgtttccaccaccattcctcaaagcttctctcaatctcgcaagattagttcctttgatgtataattatgatcacaaccaacgcctaccccacttggaagaacatatcaaatctttgttatag

SEQ ID NO: 80 - DNA, 1776 bp, Artificial sequence
  Terpene Synthase Gene Nucleic acid sequence of the 45 identified gene products
atggacacacagagaaaattgcaagcagagcaactatcttgcccaaccaagtctcatgaactaatatttgatcataaatctgatcatcaaagacgttcggccaattatacgccaaccatttggaaatatgatttcctcgagtctcttaacaacaaatatgatagtgaagagtacaaaaagcggtctgagaagcttatcgaggatgtgaggcataatattgttgaaactaaagacttaaagggtatgctagagctgattaacaccatcagaaaactaagcttgacatatcatttcgaagacgaagtcaagaaagttcttgacaaaatatcatcttccaattactactacaataataaagacattaaagatccccgcctcgtaggagacgatctctatctcgctgcattatatttcaggctccttaggcttcatggatatcaagtttcacaagacatatttgttggctacaatagtgtggattacaaaaaaggtggtgggacacataatatcacatcaacagaggtgaaagtgatgatagagcttttagaggcctcacatgtagcttttgagtgtgaggacactctaactgaggctaaagctttgatggaagaaaacctcaaaattgcctttcctgacaactgcaacaaatatattcccaaacatgaggtggttcatgctttggaacttccatctcattggagggttcagtggtttgatgtaaaatggcaaatagaagcttatcgtcaacatggtgacccggataccaacactacaactactactagtctcttggttgatttagccaaattaaactttaacataattcaagccacacttcaaaaagatcttagggagttgtccagttggtggaagaatgtgggcctttcagagaagttggaatttgcgagagataggttggtcgagagcttcatgtgtactgtgggactggcttttcagcctgaatacaaaagtctgagaaaatgtcttaccaaagtggtcaatttcatactcattgttgatgatgtttatgatgtttatggctcattggaagagctgagacacttcaccaatgccgttaataggtgggatgtccgggaaactgaggaacttccagattgcatgaagatttgtttccaagcactctaccatactacatgtgaaattgctagtgaaattgagactaagaatggttgcaaattagttttacctaatctaaagggagcgtggacagacttttgtaaatcactattaatggaggcagaatggtaccacaaggggtacatcccatcccttgaggagtatttgagcaatgcatggatttcatcttcggggcctcttcttcttcttcattcatatcttgctatgccaaatcagactaatacggcctcttctcttgacataagcaaagatcttgtctacaacatttctctcatcattcgactatgcaacgatttaggaacttcagcggctgaacaggaaagaggagatgctgcatcttctatcgtatgttatatgcaagaaacgaagagtagtgaagaggaggcccgaaagcatatccgagaaatgattagaaaaacatggaagaagatcaacaagacatgctttagtacttgcggcagtagttcactatcattatcatttatagatattgcccttaacactgctcgagtggcacatagcctctaccaatctggagatgccttcagtgctcaacatacagactataagactcatattctctccttactcgttcaccctctcattcccaataagtaa

SEQ ID NO: 81 - DNA, 1713 bp, Artificial sequence
  Terpene Synthase Gene Nucleic acid sequence of the 45 identified gene products
atggctgctttggtttcatcgaacattcatgctaattcatcatcccagaaaaatgggagtactggttccgatactattcgtcgatcggccaattttcatcctagtatctggggagatcactttctcaaatatacccatcaatcattggaagttgatgataatacaaagcaagaagttgaaaaactaaaagaggaagtgagagggatgctaactgctgcccccagcattaattcttcccaaaagctacagttaattgatacaatccaacggttaggagtcgcttatcattttgagagcgaaatcagtgacattttgggaaaaatgaagaaaatcaatcctcacactgaattggataatagtacccttcatacggtctccctttggtttcgattgcttagacaacaaggatacaacatatcaaatatatttgagaagtttacaaacaaaaaaggaaaactggacgatagtgttagtagtgatgttgaaggaatgctaagcttgtatgaagcttcacatatgagaatccatggagagcctatacttgaagaagcagtagttttcaccacaactcatttggtggaggcctctaaggagaaatcccagtgctcattatttcttgcggcacaagtcaaccatgccttaagacagcccatcttgaagggcttgccaagagtagaaattcaacgctttatttctctctatcatcacgaccctaaccacagtcatcttttgcttcgctttgctaaattggacttcaacgttctccaaaagttgcaccagaaggaacttcatgaaatttcaaacaggtggtggaaagacttggactttgcatcgaagctacctttcgcacgtgacagactagtcgagggttatatttggcctgtgggagtatactttgagccaaagtacagtgctgctagggttatattgacaaaagtaattggtgtgacaacaatgattgatgacatttatgatgtttatggaactttagaagaactggaactcttcacagacgcaatagaaaagtgggatataagctgcagtgatcaactccctgattacatgaaatattgttacgaggcactgttaaaattatacgatgaaattgaggaggagttggccatgcaaggcagaacttatcggatggcctatgcaaaggagacaatgaagaagctagctcaatcctactacgtggaagctcaatggtttcataaaaagtacacaccaacgttacaggaatatatggaggttgcactggtgtcatccacgtactacatgctcactgccacgtcattcctaggaatgggagaagaagtctcagctgaggtctttcattggcttatgaactctcctaagattgtaacagcatcagcagtagtttgcagactcatggatgatgtggtcagccacaagtttgagcaagatagaggacacgtggactctagcgtggaatgttatatgaagcaatataatgtaagagaagaagaagcgtgcaaagaattgaagaaacaagttttagatgcatggaaagaaatgaatgaggagtgcatggagccaagagatgtgcccatgtctgtcctcatgcgcgtggtcaatctcggacgagtgatcgatgctgtttacaaagatggagacggttacacccatgccggaggaatcatgaagacttttgtcaaatctttgtttattcaaactcttccctctagcttttaa

SEQ ID NO: 82 - DNA, 1698 bp, Artificial sequence
  Terpene Synthase Gene Nucleic acid sequence of the 45 identified gene products
atgttcactcaaatcttagcatcatcatcttcaaatgacaacccaaatataattgttcgtcctacaaaaaaattccacccaaatatttggggagaacgattcttacattacaacatttcacaacaagatttgtattgtcaacaacaaaaggttgaggaattaaaagaagtggttagaagagaaatatttggagattattattatgatgcttggaaaaatcaattgaagttaattgatgtggtagaacgtttgggattgtcttatcattttgaaactgaaatagaaaataagcttcaatgcatttacaacaaaaccaatattgatgatgaagatttacaccatgtttctattcgatttagacttctacgaaatggatttagaatttcttctgatatatttgaaaaattcaaagatgaggatgggaactttaaaaaatgcttggtaagtgatacccttggtttgcttagcttatatgaagcctcacatttgagctgtgttggagaaaatatacttgatgaagcacttgctttcacaacaacacacctaaatgagtttttggcgaagaaaaaagaacaccatgaagacgatgatccattatcgaaagaaatatctcgagccctagagaggcccttaagaaagaccctagtaaatcttcatgcaaggcatttcatttcgatatatgaaaaagatgcctcacataacaaagtattgttacaacttgcaaaattagattttaatctattacaatgcatgcacaaaaaggagcttagtgaagtcagcaggtggtggaaagaatcagattttgtacacaaatttccatttgcaagagataggattgtggaattgtacctttggatattaggagtttattatgaaccccaatactgtttggcaagaaatattctagtcaaaatcatagctttggcctcaattgctgatgatatttatgatgcatatggtacacttgaagaacttgagttcctaactcatgcaattgaaaggtgggatataaattgtgtagataaactgaatcaggaatatatgcaaacattttataaagatgttttgaattgttacgaagagtttgagcaactgctagaaaaagaagaaacatacagagttcattatgcaaaagaagcgtttaagggattagtccgatctcatttggatgaagctcgatgtttgcatagaggactcatcccaagttttgaagagtacttgaaatttgctttggataattgtggttactacatgttgatactaagctctttggttggaatgaaaactaatattgtaacaaaagaagtttttgagtggctctcgaaagatcgaaagattattagagcatctgttactatttgtaggctaatggatgacatagctgaacacaagtttgaggaagatgattatgaggaacattcagcagtagaatgctatatgattgaacatggcgtttgtgaagaggaagcctatgatgaactgaataagctaataatgaatgcatggaaagaaataaatgaagagtttgtgatgccaactgaagtagcttcacctatattacttcgtgctcttaacttttgtagggttatggatcttattttcaaatttggagatggttatacaaacgttggaaaaatcaccaaagatattgttgctgctttgcttattcatccaattccattattagtagttagttag

SEQ ID NO: 83 - DNA, 1710 bp, Artificial sequence
  Terpene Synthase Gene Nucleic acid sequence of the 45 identified gene products
atgtccactcaaatcttagcatcatcatcatcttcaaatgaaaacccaaataaaattgttcgtcctacaaaaacatttcatccacatatttggggagaacaattcttacattacaatatttcagaacaagatttgtattgtcaacaagaaaaggttgaggaattaaaagaagtggttagaagggaaatatttggagaatcatcaatatcatcatcagcttattatgatggttggaaaaatcaattgaagataattgatgtggtagaacgtttgggattggcttatcattttgaaactgaaatagaaaatatgatagaacaaatctgcaaccaaaccaatattgatgatgaagatttacatcatgtttctgatcggtttagacttctacgacaacatggatttagaatttcttcggatatatttgaaaaattcaaagatgaggatgggaactttaaaaaatgcttggtaagtgatacccttggtttgcttagcttatatgaagcctcacatttgagttgtgttggagaaaatatacttgatgaagcacttgctttcacaacaacacacctaaatgagtttttggcgaagaaaaaagaacaccataaagacgatgatccattatcgaaagaaatatctcgagccctagagaggcccttacgaaagaccctagtaaatcttcatgcaaggcatttcatttcgatatatgaaaaagatgcctcacataacaaagtattgttacaacttgcaaagttagattttaatctattacaatgcatgcacaaaaaggagcttagtgaagtgagcaggtggtggaaagaatcagattttgtacacaaatttccatttgcaagagataggattgtggaattatacctttggatattaggagtttattatgaaccccaatactgtttggcaagaaatattttactcaaaatcatagctttggcctcaattgctgatgatatttatgatgcatatggtacacttgaagaacttgagctcctaactcatgcaattgaaagttgggatataaactgtgtggatacactcaatcaagaatatatgcaaacattttataaggatgttttgaattgttatgaagagtttgagcaagtgctagaaaaagaagaaacataccgagttcattatgcaaaagcagcgtttaaggaattagtccgatctcatttggatgaagctcgatgtttgcatagaggactcatcccatgttttgaagagtacttgaaatttgctttggataattgtggttactacatgttgatactaagctctttggttggaatgaaaactaatattgtaacaaaagatgtttttgagtggctctccaaagatcgaaagattattagagcatctgttactatttgtaggctcatggatgacatagctgaacacaagtttgaggaagatgattatgaggaacattcagcagttgaatgctatatgattgaacatggtgtttgtgaagaagaagcctatgatgaactgaataagctaataattaatgcatggaaagaaataaatgaagagtttgtgaagccaactcaagtagcttcacctatattacttcgtgctcttaatttttctagggttatggatcttattttcaaatttggagatggttatacacacgttggaaaaatcactaaagatattgttgctgctttgcttattcatccaattccattataa

SEQ ID NO: 84 - DNA, 1722 bp, Artificial sequence
  Terpene Synthase Gene Nucleic acid sequence of the 45 identified gene products
atgtccactcaaatcttagcatcatcatcatcttcaaatgaaaacccaaataaaattgttcgtcctacaaaaacatttcatccacatatttggggagaacaattcttacattacaacatttcagaacaagatttgtattgtcaacaacaaaaggttgaggaattaaaggaagtggttagaagagaaatatttggagaatcatcaatatcatcatcagcttattatgatgcttggaaaaatcaattgaagataattgatgtggtagaacgtttgggattgtcttatcattttgaaactgaaatagaaaatatgatagaacaaatctacaacaaaaccaataattttgatcttcttaaggatgaagagttgcatgatgtttccttgtgggttagacttctacgacaacatggatttagggtttcttctgatatatttaaaaaattcaaagatgaggatggaaactttaaaaaatgtttggtaagtgatactcttggtttgcttagcttatatgaagcctcacatttgagttgtggtggagaaaatatacttgatgaagcacttgctttcacaacaacacacctaaatgagtttttggcgaagaaaaaagaacaccatgatgacgatgatccattatcgaaagaaatatatcgtgccctagagaggcccttaagaaagaccctagtgaatcttcatactaagcatttcatttcgatatacgaaaaagatgcctcacataacaaagtattgctacaacttgcaaagttagattttaatctattacaatccctacacaaaaaggagcttagtgaaatcagcaggtggtggaaagaatcaaactttgtacaaaaattcccttttgcaagagatagaattgtggagctctatctttggatgttaggagtctattatgaaccccaatactctttggcaagaaatattttagccaaaatcatagctttttcctcaattgctgatgatatttatgatgcatatggaacatttgaagaacttgaactcctaactcaagcaattgaaaggtgggatataaattgtattgatacactcaatcaagaatatttgaaaacattttataaggatcttttgaattgttatgaagagtttgagcaagtgcttacaaaagaagaaacttatagagttcattatgcaaaagaagtgtttaaagagttaatccgatcatattttgatgaagctcgatggttgaatagtggacgtgtcccaaattttgaagagtacatggaatttgcaaccattaattgtggttactatatgttgatagtgagttctttggttggaatgaaaacaagtattgtaaccaaagatgtttttgagtggctctccaaagatcgaaagattattagagcatctgttattatttgtaggctcatggatgacatagctgaacacaagtttgagaaagacaaatatgatgaagattctgccattgaatcgtatatgatgcaacatggtgtttgtgaagaagaagcctatgatgaactcaataagcttataattaatgcatggaaagaaataaatgaagagtttgtgaagccaactaaattagcttcacccatattacttcgtgttcttaatttttctagggttatggatcttctctacaaaaatggtgatggttttacacatgttggaaaagtcaccaaagattctgttgctgctttgctaattgatcccatttttcaatga

SEQ ID NO: 85 - DNA, 1724 bp, Artificial sequence
  Terpene Synthase Gene Nucleic acid sequence of the 45 identified gene products
atgattacaggactaatctccactactactttcaaagaacaaccagcaatagtccgtcgatcaggaaactacaaacccccattgtgggatgctcattttatccaatcactccaagtcatatatacggaggaaagctatgggaaaagaatcaatgagctgaaagaagatgtgagaagaattcttgagaaggaggctgaaaatcctttagttaagcttgaacagattaatgatttgagcagacttggaatatcttatcactttgaagatcaaattaaggcaatattaaacctgacatataataataataataatgcattgtggaagaaaaataatctgtatgccactgctcttcatttcaaactccttagacaatatggattcaatcctgtatcttcagaggttttcaatgctttcaaagacgagaaaaaggagttcaaagagagtttgagtaaggatgtgaaaggaatggtatgtctatatgaggcttcattctattcatttaggggtgaacccatattagatgaagcaagagatttcacaacaaaacatctcaaacaatacttgatgatgacgaggcaaggtaaaactatatctgttgaccatgatgataataatgatttaatggtgaaattagtggagcatgctttggagcttccagtgcattggagaatgaaaaggttggaggcaaggtggtttattgatatgtatgctgaaatgtctcatcatcatcatatgaattcaacttttcttcaacttgctaaactagattttaacgttgtacaatcaacataccaagaagaccttaaacatgctgtaaggtggtggaaaactactagtctaggagaaaggttaccctttgcaagagataggatagttgaaacgtttttatggactgtgggagttaaatttgagccacagtttagatattgccgaaaaatgctcacaaagatgggtcaattggtaacctcaatggacgatatatttgacgtgtatggtacgcttgatgagctaagcctctttcaagacgcattggaaaggtgggatataaatacgatagaccaacttccagattacatgaagatattttttttggctgcttataatgtggtgaatgaaatggcgtatgacgtgctaaaacaaaatgggattctcattatcaaatatttaaagaaaacgtggacggatttatgtaaatgttacatgttggaggcaaattggtatcatagtggatacacaccaagcttggaagaatacattaaaaatggatggatatcaattgcagaacccttacttctagtcaatctttattgccttataaccaatccaataaaagaagatgacatggactgcttgcttcaatatcccacctttattcgtatctcaggaatcattgttcgacttgttgatgatttaggaacttcatcggatgaactgaaaagaggagacaatcctaaatcgattcaatgctatatgaaagaaaatggtatttgtgatgaaaagaatggccgtgaacacataaggaatttaatcagtgaaacatggaaggaaatgaatgaagctcgagtgggtgagtctccattttctcaagcttttattgaaactgccatagatttcgttaggacagcaatgatgatataccaaaaggagcaagatggggttggtactaatattgatcatacacaaaagatggaatcatttccttgttcttcacttccattcccatt

SEQ ID NO: 86 - DNA, 1819 bp, Artificial sequence
  Terpene Synthase Gene Nucleic acid sequence of the 45 identified gene products
atgtcatcgattatttattccccgtttacttctctacttccactaaagccaatatcatcagcatcatcaacagcaacaattaatacaagattaaaaaaccgattccgatcatcaatactagtagtactacgaccccagcaaagacgctcagctaagtaccatcctacagtttgggaaaataagcatatcgactctttctttactccctacaactatgagttacactctgaacgactacaagagttgaagcaagttacgagtacttcacttagaaccacaaaagacccttgtattctcttaaagcttattgattctatccaaaggttgggactcgaatatcacttcgaaaatgagattaaagatgctgtttctttcatttacgcacataatgatcaaactaccagtaatgatctcttcatgacagcacttagatttcgtattcttaggcaacatggcttatttgttggctcagatgtgtttgacagatttagaggcagagatgggaaattcttggacagcttaagcagtaacaagcatggaattttgagtttgtatgaagcttcacaccttggaatggctgaagaaaatgttttggaggaagccaagagtttcaccaccaaaaggctaagatatttctcagctgggaaaatggataatactttgtttggtaagcaagtgaaacaatcactggaagttccactgtattggaggatgccaagatctgaagctaggaatttcattgatctctaccaaatggatgagacaaagagtgtgactttgcttgagttggctaagttggattataatctggtccaatctgtgcatcaaaatgagcttaaggagttgggaaggtggtgggaaaatttgggattcaagaaaaatctaccttttgcaagagatcgtgtggtggagaactatttgtgggccgtgggaatcgtatctgagccacagttctccaaatgcaggataggcttaaccaagttcgtttgcatattaacagcaatagatgatgtttatgacatatatggatcattagatgagcttgaacttttcacaaatgcagtagaaagctgggacataagggcaataagggatgaatttcctctttatttgaaaacatgctatcttggcatgcttaattttggtaatgaagtgatcgatgatgttcttcaaaaccatggcttgaatatttcctcctacattaaagaagagtggttaaatctctgcaaatcatatcttgtagaagcaaggtggttttataatgattatacaccaagtttgaatgaatacttggaaaattcatctacttcagttggtggtcatgcagctatagttcatgcttgtattttaatcttagatggctccatacccgaaaccttactggattacaatttcaaccattttcactctaagctgatttattggtcatctctcataacaaggcttagtgatgatttaggaacttcaaaggatgagcttaaaagaggagatgtgaagaaatcagtggagtgctacatggcagagaaaggaatatgggaagaagaagaagcaataaatcacataaaagaattgagaagaaattcatggaaaatggtgaacaaggagataataattgggaataattgcttgccaaaaataatggtgaagatgtgcttgaacatggcaagaactgctcaattcatattccaacatggtgatggaattggcacatcaactggggccaccaaacatcgtttagcctcattgattgtcaaacctgtacacatcgatccatgttccaaaccaattaatggacttggagactcacatacaaccataa

SEQ ID NO: 87 - DNA, 1659 bp, Artificial sequence
  Terpene Synthase Gene Nucleic acid sequence of the 45 identified gene products
atgtcaaatattcaagtcttagcttcatctcaattatgtgacaaaattattgctcgtccaacaacaaattttcacccttctatttggggcgatcgattcctccattacaatatttcagaacaagacttggtatgcaaacaagaaagagttgaagaattaatacaagttgtaaagaaagagatattatcttcaaatcatgatcaattgaagttgattgacaatctccaacgtttgggattatcacatcattttgagagtgaaattgagaaattgttggaacaattaagtatcggcactcatcatcaaaatcatcatgatctacatgatgcttctcttcggtttagattattaagacaacatggatttaatgtttcatcaagtatatttgaaaaatttaaggacgataaaggtaactttaagaaaagcttgataaccgatgtttcgggtttacttagtttgtatgaggcttcacacttgagttatgttggagaaagcatactagatgaagcacttgctttcacaaccactcaccttaaggctattgtggcaaatagtaaagatcatccattatcacatcaaatatccatagccttgcataggcctctaagaaagaccatagagaggcttcatgctaggttttacatctcaatctatgaaaaggatgcctctcataacaaagtattgctagagcttgcaaagttagatttcaatctacttcaatgtttccacaaaaaggaacttagtgaaattatgaggtggtggaaggagcatgagtttgtaaagaaattcccttttgcaagagataggatggtggaactgtatttttggatcttgaatgtatattatgaacccaaatactctcgagcaagaaagcttttgaccaaagtcattgcattgacctcaatcactgatgatacttatgatgcatatggtactattgatgagcttgagcttcttaccaaagcaattcaaaggtgggacataaattgtatagataaacttgagccagaatatttaaagacatattataaggtaatgttggattcttatgaagaatttgaaaaggagcttaaaaaggaagaattatacaaactcgagtatgcaaaagaagagatgaaaagaattattagagcttattttgaagaagctcgatggttgaatgaaggatatttgccaaggttggatgagcatttgagagtttcatatgtttcttgtggttacgttatgttgatagccacaagttatgtaggaatgcatgatattgtaacacatgaaactctagattggctctctaaagaccctaagattgtttcagcttccactctcctatcaagattcatggatgacataggctctcgcaagtttgagcaacagagaaatcacataccatctacagttgattgttacatgaaacaatatggagtatcagaggaagaggcaattaaagaacttaataaaagagtggtcacctactggaaagaaatcaatgaagactttattaggccaactgttgtgccttttcctatcttacttcgtgttcttaattttacaaaagtagcagatcttctttacaaagagggtgatgatcaatacacaaatgttggaaaagtgctcaaagaaagcattgctgctttacttatagattcaatcccattataa

SEQ ID NO: 88 - DNA, 1659 bp, Artificial sequence
  Terpene Synthase Gene Nucleic acid sequence of the 45 identified gene products
atgtcaaatattcaagtcttagcttcatctcaattaagtgacaaaattattgctcgtccaacaacaaattttcacccttctatttggggcgatcgattcctccattacaatgtttcagaacaagacttggtttgcaaacaagaaagaattgaagaattaatacaagttgtgaagaaagagatattatcttcaaatcatgatcaattgaagttgattgacaatctccaacgtttgggattatcacatcattttgagagtgaaattgagaaattgttggaacaattaagtatcggcactcatcatcaaaatcatcaagatctacatgatgcttctctttggtttagattattaagacaacatggatttaatgtttcatcaagtatatttgaaaaatttaaagacgatgaaggtaactttaagaaaagcttgataaccgacgtttcgggtttacttagtttgtatgaggcttcacacttgagttatgttggagaaagcatactagatgaagcacttgctttcacaaccactcaccttaaggctattgtggcaaatagtaaagatcatccattatcacatcaaatatccaaagccttggaaaggccactaagaatgaccttagagaggcttcatgctaggttttatatctcaatctatgaaaaggatgcctctcataacaaagtattgctagagcttgcaaagttagacttcaatctacttcaatgtttccacaaaaaggagcttagtgaaattgtgaggtggtggaaggagcatgagtttgcaaagaaattcccttttgcaagagataggatggtggaactgtatttttggatattgggtgtatattatgaacccaaatactctcgagcaagaaaacttctaaccaaagtcattgcattgacctcaatcactgatgatatttatgatgcatatggtactattgatgagcttcagcttcttaccaaagcaatgcagaggtgggacataaattgtatggataaacttgagccagaatatttaaagacatattataaggtaatgttggaatcttatgaagaatttgaaaaggagcttaaaaaggaagaattatacaaacttgagtatgcaaaagaagagatgaaaagaattattggagcttattttgaagaagctcgatggttaaatgaaggatatttgccaagcttcgatgagcatttgagagtctcttatatttcttctggttacgttttgttgatagccacaagttatgtaggaatgcatgatattgtaacacatgaaactctaaattggctctccaaagaccctaagattgtttcagcttctactctcctctcaagattcatggatgacataggctctcgcaagtttgaacaagagagaaatcacgtactatctacagtggaatgttacatgaagcaatatgaggtttcagaggaagaagcaattaaagaacttaataaaagagtggccaattgttggaaagaaataaatgaagactttattagaccaactagtgtgccttttcctattttatttcgtattattaatttgaccaagacagctgattttatgtacagagaaggtggtgaccaatatacacatgttggaaaggtgttgaaagatagcattgctgctttacttatagatccaatcccatattaa

SEQ ID NO: 89 - DNA, 1656 bp, Artificial sequence
  Terpene Synthase Gene Nucleic acid sequence of the 45 identified gene products
atgtcaaatattcaagtcttagcttcatctcaattaagtgacaaaattattgctcgtccaacaacaaattttcacccttctatttggggcgatcgattcctccattacaatgtttcagaacaagacttggtttgcaaacaagaaagaattgaagaattaatacaagttgtaaagaaagagatattatcttcaaatcatgatcaattgaagttgattgacaatctccaacgtttgggattatcacatcattttgaaagtgaaatcgagaaattattggaacaattaagtatcggcactcatcatcaaaatcatcatgatctacatgatgcttctctttgctttagattattaagacaacatggatttaatgtttcatcaagtatatttgaaaaattcaaagacgagaaaggtaactttaaaggaagcctaataactgatgttccaggtttgcttagcttgtatgaggcttcgcacttgagttatgttggagaaagcatactagatgaagcacttgctttcacaaccactcaccttaaggctattgtggcaaatagtaaagatcatccattatcacatcaaatatccatagccctgcataggcctctaagaaagaccatagagaggcttcatgctaggttttacatctcaatctatgaaaaggatgcctctcataacaaagtattgctagagcttgcaaagttagatttcaatctacttcaatgtttccacaaaaaggaacttagtgaaattatgaggtggtggaaagagcatgagtttgcaaagaaatttccttttgcaagagataggatggtggaacagtatttttggatattgggtgtatattatgaacccaaatactctcgagcaagaaaacttctaaccaaagtcattgcattagcctcaatcactgatgatatttatgatgcatatggtactattgatgagcttgagcttcttacaaaagcaatgcaaaggtgggacataacttgtatggataaacttgagccagaatatttaaagacatattataaggcaatgttggattcttatgaagaatttgaaaaggagcttaaaaagaaaatatacaaacttgagtatggcaaagaagagatgaaaagaattattggagcttattttgaagaagctcgatggttgagtgaaggatatttgccaaggttggatgagcatttgagagtttcatatgtttcttgtggttacgttttgttgatagccacaagttatgtaggaatgtatgatattgtaacacatgaaactctaaattggctctccaaagaccctaaaattgtttcagcttccactctccttgctaggttcatggatgatattggttctcgcaagtttgagcaaaagagaaatcacataccatctacagtggattgttacatgaaacaatatggggtatcagaggaagaggcaattaaagaacttaataaaagagtggacacccactggaaagaaattaatgaagactttattaggccaactgttgtgccttttcctatcttagttcgtgttcttaattttacaaaaacagtagatcttctttacaaagagggcgatgatcaatacacaaatgttggaaaagtgctcaaagaaagcattgctgctttgcttatagattcaatcccattataa

SEQ ID NO: 90 - DNA, 1656 bp, Artificial sequence
  Terpene Synthase Gene Nucleic acid sequence of the 45 identified gene products
atgtcaaatattcaagtcttagcttcatctcaattaagtgacaaaattattgctcgtccaacaacaaattttcacccttctatttggggcgatcgattcctccattacaatatttcagaacaagacttggtttgcaaagaagaaagaattgaagaattaatacaagttgtaaagaaagagatattatcttcaaatcatgatcaattgaagttgattgacaatctccaacgtttgggattatcacatcattttgaaagtgaaattgagaaattattggaacatttaagtaccactcatcatcaaaatcatcatgatctacatgatgcttctctttgctttagattattaagacaacatggatttaatgtttcatcaagtatatttgaaaaattcaaagacgagaaaggtaactttaaaggaagcctaataactgatgttccaggtttgcttagcttgtatgaggcttcgcacttgagttatgttggagaaagcatactagatgaagcacttgctttcacaactactcaccttaaggctattgtggcaaatagtaaagatcatccattatcacatcaaatatccatagccttgcataggcctctaagaaagaccatagagaggcttcatgctaggttttacatctcaatctatgaaaaggatgcctctcataacaaagtattgctagagcttgcaaagttagatttcaatctacttcaatgtttccacaaaaaggaacttagtgaaattatgaggtggtggaaagagcatgagtttgcaaagaaatttccttttgcaagagataggatggtggaacagtatttttggatattgggtgtatattatgaacccaaatactctcgagcaagaaaacttctaaccaaagtcattgcattagcctcaatcactgatgatatttatgatgcatatggtactattgatgagcttgagcttcttacaaaagcaatgcaaaggtgggacataacttgtatggataaacttgagccagaatatttaaagacatattataaggcaatgttggattcttatgaagaatttgaaaaggagcttaaaaaggaagaattatacaaacttgagtatgcaaaagaagagatgaaaagaattattggagcttattttgaagaagctcgatggttgagtgaaggatatttcccaagcttggatgagcatttgaaagtttcatatgtttcttgtggttacgttttgttgatagccacaagttatgtaggaatgtatgatattgtaacacatgaaactctaaattggctctccaaagaccctaaaattgtttcagcttccactctccttgctaggttcatggatgatattggttctcgcaagtttgagcaaaagagaaatcacataccatctacagtggattgttacatgaaacaatatgaggtatcagaggaagaggcaattaaagaacttaataaaagagtggacacccactggaaagaaattaatgaagactttattaggccaactgttgtgccttttcctatcttagttcgtgttcttaattttacaaaaacagtagatcttctttacaaagagggcgatgatcaatacacaaatgttggaaaagtgctcaaagaaagcattgctgctttgcttatagattcaatcccattataa

SEQ ID NO: 91 - DNA, 1646 bp, Artificial sequence
  Terpene Synthase Gene Nucleic acid sequence of the 45 identified gene products
atgtcaaatattcaagtcttagcttcatctcaattaagtgacaaaattattgctcgtccaacaacaaattttcacccttctatttggggcgatcgattcctccattacaatgtttcagaacaagacttggtttgcaaacaagaaagaattgaagaattaatacaagttgtgaagaaagagatattatcttcaaatcatgatcaattgaagttgattgacaatctccaacgtttgggattatcacatcattttgagagtgaaattgagaaattgttggaacaattaagtatcggcactcatcatcaaaatcatcaagatctacatgatgcttctctttggtttagattattaagacaacatggatttaatgtttcatcaaatatatttgaaaaatttaaggacgatgaaggtaactttaagaaaagcttgataaccgatgtttcgggtttgcttaatttgtatgaggcttcacacttgagttatgttggagaaagcatactagatgaagcacttgctttcacaaccactcaccttaaggctattgtggcaaatagtaaagatcatccattatcacatcaaatatccaaagccttggaaaggccactaagaatgaccttagagaggcttcatgctaggttttacatctcaatctatgaaaaggatgcctctcataacaaagtattgctagagcttgcaaagttagacttcaatctacttcaatgtttccacaaaaaggagcttagtgaaattgtgaggtggtggaaggagcatgagtttgcaaagaaattcccttttgcaagagataggatggtggaactgtatttttggatattgggtgtatattatgaacccaaatactctcgagcaagaaaacttctaaccaaagtcattgcattgacctcaatcactgatgatatttatgatgcatatggtactattgatgagcttcagcttcttaccaaagcaatgcagaggtgggacataaattgtatggataaacttgagccagaatatttaaagacatattataaggtaatgttggaatcttatgaagaatttgaaaaggagcttaaaaaggaagaattatacaaacttgagtatgcaaaagaagagatgaaaagaattattggagcttattttgaagaagctcgatggttaaatgaaggatatttgccaagcttcgatgagcatttgagagtctcttatatttcttctggttacgttttgttgatagccacaagttatgtaggaatgcatgatattgtaacacatgaaactctaaattggctctccaaagaccctaagattgtttcagcttctactctcctctcaagattcatggatgacataggctctcgcaagagaaatcacgtactatctacagtggaatgttacatgaagcaatatgaggtttcagaggaagaagcaattaaagaacttaataaaagagtggccaattgttggaaagaaataaatgaagactttattaggccaactagtgtgccttttcctattttatttcgtattattaatttgaccaagacagctgattttatgtacagagaaggtggtgaccaatatacacatgttggaaaggtgttgaaagatagcattgctgctttacttatagatccaatcccatatta

SEQ ID NO: 92 - DNA, 1659 bp, Artificial sequence
  Terpene Synthase Gene Nucleic acid sequence of the 45 identified gene products
atgtcaaatattcaagtcttagcttcatctcaattaagtgacaaaattattgctcgtccaacaacaaattttcacccttctatttggggcgatcgattcctccattacaatgtttcagaacaagacttggtttgcaaacaagaaagaattgaagaattaatacaagttgtgaagaaagagatattatcttcaaatcatgatcaattgaagttgattgacaatctccaacgtttgggattatcacatcattttgagagtgaaattgagaaattgttggaacaattaagtatcggcactcatcatcaaaatcatcaagatctacatgatgcttctctttggtttagattattaagacaacatggatttaatgtttcatcaaatatatttgaaaaatttaaggacgatgaaggtaactttaagaaaagcttgataaccgatgtttcgggtttgcttaatttgtatgaggcttcacacttgagttatgttggagaaagcatactagatgaagcacttgctttcacaaccactcaccttaaggctattgtggcaaatagtaaagatcatccattatcacatcaaatatccaaagccttggaaaggccactaagaatgaccttagagaggcttcatgctaggttttacatctcaatctatgaaaaggatgcctctcataacaaagtattgctagagcttgcaaagttagacttcaatctacttcaatgtttccacaaaaaggagcttagtgaaattgtgaggtggtggaaggagcatgagtttgcaaagaaattcccttttgcaagagataggatggtggaactgtatttttggatattgggtgtatattatgaacccaaatactctcgagcaagaaaacttctaaccaaagtcattgcattgacctcaatcactgatgatatttatgatgcatatggtactattgatgagcttcagcttcttaccaaagcaatgcagaggtgggacataaattgtatggataaacttgagccagaatatttaaagacatattataaggtaatgttggaatcttatgaagaatttgaaaaggagcttaaaaaggaagaattatacaaacttgagtatgcaaaagaagagatgaaaagaattattggagcttattttgaagaagctcgatggttaaatgaaggatatttgccaagcttcgatgagcatttgagagtctcttatatttcttctggttacgttttgttgatagccacaagttatgtaggaatgcatgatattgtaacacatgaaactctaaattggctctccaaagaccctaagattgtttcagcttctactctcctctcaagattcatggatgacataggctctcgcaagtttgagcaagagagaaatcacgtactatctacagtggaatgttacatgaagcaatatgaggtttcagaggaagaagcaattaaagaacttaataaaagagtggccaattgttggaaagaaataaatgaagactttattaggccaactagtgtgccttttcctattttatttcgtattattaatttgaccaagacagctgattttatgtacagagaaggtggtgaccaatatacacatgttggaaaggtgttgaaagatagcattgctgctttacttatagatccaatcccatattaa

SEQ ID NO: 93 - DNA, 1725 bp, Artificial sequence
  Terpene Synthase Gene Nucleic acid sequence of the 45 identified gene products
atgatcattacaggagtaatctccagtagtactccaatattcaaagatcaaccagcagcaatcgtccgccgatcaggaaactacaaacccacattgtgggatgctcattttttccaatcactccaagtcatatatacggaggaaagctatgggaaaagaatcaatgagctgaaagaagatgtgagaagaattcttgagaaggaggctgaaaatcctttagttaagcttgaacagatcaatgatttgagcagacttggaatatcttatcactttgaagatcaaattaagacaatattaaacctgacatttaacaataataatgcattgtggaagaaagataatttgtatgccactgctcttcatttcaaactccttcgacaatatggattcagtcctgtatcttcagaggttttcaatgccttcaaagacgagaaaaaggagttcaaagagagtttgagtaaggatgtgaaaggaatggtatgtctatatgaggcttcattctattcatttaggggtgaacccatattagatgaagcaagagacttcacaaccaaacatctcaaacaatacttgatgacaaggcaaagtcaatttactagagttgaccatcatgatgatgatgatcatgatcttgtgaaattggtagagcatgccttggatcttccactccattggagattgccaagattggaggctaggtggtttattgatatgtatgctgaaaggaattatgatatgaatccaacttttcttgactttgctaaacttgactataacttcgttcagtcagcataccaaaaagagctcaaatatatttcaaggtggtggagtggttctagattgacagaaaggctaccatttgctagagacagagtagtggaaattttctattctgcagtggcattgaaatatgaggcagaatttggatttgttagaactgtgatgacaaaaattggtctcttgctaacactcatggacgatatatatgatgtgtatggtacactagatgagcttcagctttttctagaggcaattgagaggtggaatataaatgaactggatcagctacccgattacatgaagatattgtttgttgctttttataacaatgtgaatgagatatcttattatgtcctcaaagaaaatgggattcacaccatcaaatatctgaagaaagcgttgggggatctgtgtaaatgctatatggaggaggcaaaatggtttcacagtggacacataccaagtttagaagaattcattgagaatggatggaaatcaattacaatacctctttgtcttatctatcattattgcttaattacaacttcaattacagaacaagacatggaacacttgcttcaatatccaaccattttacgtgtctcaggaactgtttttcgatttatagatgatttgggaacctcatcagatgaacttgaaagaggagataatccttcatcaattcaatgctacatgcgtgaaaagggtgttagtgaaaatgaaagccgtgaacacatatggaatttaattagtgaaggatggaaggaaattaatgaagtcaaagcttcaaactctccatactctcaagtgtttattgaatctgccattgattttgttagaggagcaatggagatgtaccacaagggtgatggttttggtactaatcaagaccgatatcttaagaccaaagttgtcaacatgttcttcgatccaattccaatttaa

SEQ ID NO: 94 - DNA, 1899 bp, Artificial sequence
  Terpene Synthase Gene Nucleic acid sequence of the 45 identified gene products
atggctgcaatattaagtagtattattagcttgaatagtaataataataatgccttcactagatctgtgaaatcatgtttaagttcaaaccataataattataatattattcataataaaactgtattaatgtctaccaataataataataatattaataatattatttctcgaagatcagcaaactatcaaccttcactttggcattttgattatgtacaatcactttctacccctttcaaggaaggagcatatgccaaaagagttgagaaagtaaaggaagaggtaagagtaatggtgaagagagcaaaagaggaggagaagcctttatctcaacttgagctaattgatgtaatgcaaagacttggaatctcttaccactttgagaatgaaattaatgacatattgaaagatatatataacaacaataatgtgtgcaacaccaacaaaaatgtctatgccaattctcttgaatttagactcctaagacaacatggttatccagtgtctcaagaaatttttagtacgtgcaaagatgaaagaggcaattttatggtgtctaccaataatatcaaaggaatgttatctttatatgaagcttcattctatttggtagaaaatgaagatggtattttggaagagacaaggcaaacaacaaagaaatatcttgaggaatacataatcatgatcatggaaaaacaacaatcattattagatcaaaataataataataataatgattatgattatgattatgtttatgaactagtgagccatgcattggagcttccacttcattggagaatgttaagattggagagtaggtggtttattgatgtgtatgagaagagactagacatgaaccctactctacttaccttagctaaactagatttcaacattgtccaatcaacataccaagatgatcttaaatatgttttcaggtggtggaaaaacactggtttgggagaaaagttgaaatttgcaagagatagaatgatggtgaattttttatggacaataggagtttcatttgagccacactacaaaagtttaagaagaatggctacaaaagtaaatgctttaataacaataatagatgacatatatgatgtttatggtacacttgatgaattggagctcttcactaatgtggttgagagatgggatgttagtgctatgaatgggctccctgagtatatgaagattaaaaactgcttccttgatttgcacaattttataaatgactttgcatttgatgtgttaaaaggaaaaagcctccatgtaaaaaaataccttcaaaaaacgtgggcagatctttgtaaatcttatttaagagaagcaaggtggtattatgatggatacacaccaagatttgaagagtacattgagaatgcatggatatcaatatcaggacctgttatactatcacatttatacttttttgtagtgaatccaaacgaggaagatgccttattaagtacttgctttgatggataccctaccataatacgccattcgtcgatgattttacgacttacaaatgatctctccacttcaacggatgagttgaaaagaggtgatgttcccaaatcaattcaatgcaaaatgcatgaagatggtgtatgtgaagagaaagctcgtcaacatattaagttattaataaataaaacatggaagtttcttaataaagattgcataaatttggatgatgattactctccaatgttctctaaacctaataataatattaataaggctttcattgaaatgtgtttaaaccttggtagaatgtcacattgcatttatcaatatggagatggacatggaattcaagatcgccaaacaaaagatcatgtactatcattacttattcaccctattcttcttacccaatag

SEQ ID NO: 95 - DNA, 1704 bp, Artificial sequence
  Terpene Synthase Gene Nucleic acid sequence of the 45 identified gene products
atgtcgtctcaaatcttagcaacctcatccaaaaattacaatatacataaaattgttcggccaacaacaaattatcatccttctatttggggagaccgatttttgcattacgatattccaaaagaagaattgaattataaacaaggccaagttgaagaattggaaaaagtggtaagaaaggagatatttggagaattcttatgtgatgattggagtaatcgattgaagttaattgatgtggtgcaacgtttgggattgtcctatcattttgagagtgaaatacaaaatgagcttcaacacatttacaacaaaataagcattaatgataataatttcaaacatgaaactttgcatgatgcttctattcggtttagacttctacgacaacatggatatagggtttctttagatatatttgacaagttcaaagatgagaatggcaactttaaagaatgtttggcgagtgacaccgttggtttgcttagcttatatgaggcctcacatttgagctgtgttggagaaaatttactagatgaagccctttctttcactaccaaacacctaactgaatttttggaaaataataaaaaagaacaccccaatgatgatccattatcaaaggaaatatctcgagccctagagaggcccttaagaaagaccctagtgaatctccatgcaaggtatttcatttcaatatatgaaaaagatgcctcacataacaaagtattgctacaacttgcaaagttagatttcaatctattacaatccatgcacaaaaaggagcttagtgaaatctcaaggtggtggaaggaattagacagtgcacacaactttccatttgcaagaaataggattgtggaactatacatttggatattaggagtctattatgaaccccaatactcttttgcaagaaatattttagtgaagatcatagcactttcctcaatcgctgatgatatttatgattcatatggtatatttgaagaacataagctccttattgaagcaattgataggtgggacaaaaattgtatggataaactccatccagaatacttgcagaaatattataagatacttttgcaatcttttgaggaatttgaacaagagtttgaaaaggaggaaacttacaaagtttactatggaaaagaaacgtttaaaagattattaagaggttattttgaggaagctcgatggttgaatgaaggatacatgccaagtttggaggagcatttaaaagtttctttggttacttctggttatttcatgttgatggcttgctctttagttggaatgaaaagtaacaatattgtaaccaaacaagttttcgagtggctctccaaagaccccaagattgttggggcaagcgctagtgtttgcaggtacatggatgacgtggctggtcacaagaatgagcaagagagaaatcatataccatctacaatagaatgttacatgaagcaatatggtgtatcagaagaagaagcatgtgatgaaatgaataggcgagtggttattgcatggaaagaaataaacgaagagtttctcaaaccaactgaagcagcttcacctatattagttcgtgctctgaatcttgctagggttatggatcttctctacaaaaatggtgataactatacacaagttggaaaagtcactaaagatagtgttgctgtcttgctcattgatccaattccataa

SEQ ID NO: 96 - DNA, 1869 bp, Artificial sequence
  Terpene Synthase Gene Nucleic acid sequence of the 45 identified gene products
atggcttgcataactgttcaacaccatttttcttcattactccctaatatttgcagtagtactaattttggtgtattttatagaccaaaaatatatactaactataatattattaatggtggtacaaaatcaagattatcaagtgcatgctaccccatcatatgtgctgtggtcaatagttctaatgcaattattgatcgacgatctgccaactttgagccctccatttggtcttttgattatattcaatctcttacaagccaatataaggaagaatcttatacaggtcgagtcaaagaattggagatagatgtgaaaaagatgttaattgagatggaaaattctttaattcaacttaaactcattgacacattgcaaagacttggagtatcttatcgttttgaggatgaaataaatactattttgaaagaaaaatatattaatatgatcaataaccctaattataataatttatatgtcactgctcttgaatttaggcttctacgtcaacatggctatgcagtacctcaagagatttttaatcattttaaggacgagataggaaaaatcaaaacgaacatgattagtgatgatattatggaagtattggccttatatgaagcttcattctatgagaaaaaaggcgaaagtattttagaagaagttagaattttcacaactcaatatctaaagaactacattataatgatatcacaagaaagaaagttaatgattgataatgataatgattatgattatgatatcgaaatagtgaatcacgctttggagctcccacttcatcggaggactacaagaacagaagctaagtggttcatcgacgcgtatgagaaaaaacaagacatgaatcctattttgcttgagtttgctaaactcgatttcaacatgatacaatcaacacatcatgatgatctaaaacatatattcaggtggtggaggcatactaaacttggggagaaattgaattttgcaagagatcgattgatggaatgtttcttatggaaagttggaataagatttgagccaaaattcagttattttagaaaaacaactgccaaattatttgagctaataacagtaattgatgatatatatgatgtttatggaacattggatgaattagagcttttcaccaaagctattgagaggtgggatatggaaatgataaatgagttaccagaatatatgaagatgccttatattgttttacacaataccattaatgaaatggtatttgaggtattaagagaccaacacatctccatcaacattcaataccttaagaaaacgtgggtagatatgtgtagaggttttttacaagaggcaaaatggtactatagtggatatacaccaacactagaagaatatattaaaaatggttggatttcagtgggagcaccggttctaattgtgcatgcttatttttctcatgcaaattataatcacacagttacaagtagtaaagagattttcgaatgctttgaacatggttattatcccgccataattcgtcatagtgccataatattacgacttacaaatgacctagcaacatcatcggaggaactgaaaagaggtgatgctccgacatcaattcaatgttatatgcaagaaaaaaaagtatctgaggagaaagctcgtgaacatattaagtttttaataagtgaaatatggaaagagatgaataatgatgttggattatatccaatctcattgattgaagatgctacaaattttgctaagatgggatttttcatgtatcagcatggtgatggtcatagttctcaagataatcaatccaaacaaaaaatttcatccttgattattgaacctattcccttatatacataa

SEQ ID NO: 97 - DNA, 1857 bp, Artificial sequence
  Terpene Synthase Gene Nucleic acid sequence of the 45 identified gene products
atgcattgcataacccttaaacaccaaatttctccattactccctaatatttgcagtactactaattttggtgtattttttagaccaaaattatatactaattataatattattaataatgctacaaaatcaagattatcaagtgcatgctaccccatccaatgtgctgtggtcaatagttctaatgcaattattgatcgacgatcagccaactttgagccctccatttggtctttcgattatattcaatctcttacaagtcaatataagggagaaccttatacaagtcgagtgaaaaaacttgagagagatgtgaaaaaaatattagttgagatggaaaactctttagctcaacttgaactcattgatacattgcaaagacttggaatatcttaccgttttgagaatgaaataaattctattttgaacaaaaaatatgtcaatattaataatcctaattataatttatatgccattgctcttcaatttaggcttctacgtcaacatggctatgcagtacctcaagagatttttaatcagttgaaggacgagatagaaaacatcaaaaaaaacataaatggtaatgatatcatgggaatattagccttatacgaagcttctttttatgagaaaaaaggcgaaagtattttaaaggaagctagaattttcacaactaaatgtctcaaaaactacactatcatgatatcagagcaaaaaaagttactgattgataatgattatgattatgatatcgaagtagtgaatcatgccttagagctcccacttcatcggaggaccacaagaacagaagcaaagtggttcattgacgcatatgcgaaaaaacaagacatgaatcctatgttgcttgagttagccaaactcaatttcaacacagtacaatcaacacatcatgaagatctaaaacatatattcaggtggtggagacatactaaacttggagagaaattgaattttgcaagagatcgattgatggaatgtttcttatggaatattggaataagatttgagtcaaaattcagctattttagaacaaaaactgccaaattatttgagctagtaacatttatagatgatatatatgatgtttatggaacattggatgaattagagcttttcaccaaagctgttgagagatgggatgtgaaaatgataaatgagttaccagaatacatgaagatgccttatcttgttttacacaataccataaatgatatggtatttgaggtgttaagagaccaagaaatttccatcaacattcaataccttaagaaaacgtgggtcgatatgtgtaaaagtttcttgcaagaggcaaaatggtactatagtggatacacaccaacattggaagaatatattgaaaatggttggatttcagtaggagcaccagttattcttgtgcatgcttatttttttcacgcaaataataatcgcacaattacaaatactaaagagatttttgaatgcttggaacatggttattatcctgccattattcgtcacagtgccataatattacgatttacaaatgacctaacaacatcatcggaggaattgaaaagaggtgatgctccgacatcaattcaatgttacatgcaagaaaaaaatgtatctgaagaggaagctcgtgaacatattaagtttttaataaatgaagcatggaaggagatgaataatgatgttggattatatccaatctcattgactgaagatgctacaaactttgctaagatgggatttttcatatatcaacatggtgatggtcatagttctcaagataatcaatccaaacaaaaaatttcatccttgattattgaacctattcccctatatacataa

SEQ ID NO: 98 - DNA, 1908 bp, Artificial sequence
  Terpene Synthase Gene Nucleic acid sequence of the 45 identified gene products
atggctgcattagtgtccactgtaagtagtattattagcttgaatattaataataataataacaccttcactagatctgtgaaatcatgtttaagttcaaaccataatattaatattattcataataaaactgcattaatgtctaccaataataataataatattaataatattatttctcgaagatcagcaaactatcaaccttcactttggcattttgattatgtacaatcactttctaccctttcaaaggaaggagcatatgccaaaagagttgagaaagtaaaggaagaggtaagagtaatggtgaagagagcaaaagaggaggagaagcctttatctcaacttgagcttattgatgtaatgcaaagacttggaatctcttaccactttgagaatgaaattaatgatacattgaaagatatatataacaacaataatgtgtacaacaccaacaataatgtgtatgccaattctcttgaatttagactcctaagacaacatggttatccggtgtctcaagaaatatttagtacgtgcaaagatgaaagaggcaattttatggtgtcttccaatgatatcaaaggaatgttatctttatatgaagcttcattctatttggtagaaaatgaagatggtattttggaagagacaagagaaaaaacaaagaaatatcttgaggaatacataatcatgatcatggaaaaacaacaatcattattagatcaaaataataataatgattatgattatgattatgaactagtgagccatgcattggaacttccacttcattggagaatgttaagattggagagtaggtggtttattgatgtgtatgagaagagactagacatgaaccctactctacttaccttagctaaactagatttcaacattgtccaatcaatataccaagatgatcttaaacatgtcttcagctggtgggaaagcactaatatgggaaagaagttggaatttgcaagagatagaacaatggtgaatttcttatggacagtaggagttgcatttgagccacatttcaaaagttttagaagaatgattacaaaagtaaatgctttaataacagtaatagatgacatatatgatgtttatggtgcactagatgaattggagctcttcactaacgcagttgagagatgggatattagtgctatggatgggctccctgagtatatgaagacatgttttcttgctttatacaatttcataaatgatcttccatttgatgtgttaaaaggggaagaaggcctccatgtaataaaattccttcagaaatcgtgggcagatctttgcaaatcttatttaagagaagcaagatggtattataatggatacacaccaagatttgaagagtacattgagaatgcatggatatcaatatcaggacctgttatactatcacatttatacttttttgtagtgaatccaaacatggaagatgccttattaagtacttgctttaatggataccctaccataatacgacattcatcgatgattttacgtcttacagatgatcttgcaacttcaacggatgaattgaaaagaggcgatgttcccaaatcaatccaatgcaaaatgtacgaagatggtatatctgaagaggaagctcgtcaacgtattaagttattaataagtgaaacatggaagcttattaataaagattacataaatttggatgatgatgatgatgatggtgatgactactctccaatgttctatgagtctaataatattaataaggctttcattgaaatgtgtttaaaccttggtagaatggcacattgcatttatcaatatggagatggacatggaattcaagatcgccaaacaaaagatcatgtactatcattacttattcaccctattcctcttacccaatag

SEQ ID NO: 99 - DNA, 1719 bp, Artificial sequence
  Terpene Synthase Gene Nucleic acid sequence of the 45 identified gene products
atgattacaggactaatctccactactactttcaaagaacaaccagcaatagtccgtcgatcaggaaactacaaacccccattgtgggatgctcattttatccaatcactccaagtcatatatacggaggaaagctatgggaaaagaatcaatgagctgaaagaagatgtgagaagaattcttgagaaggaggctgaaaatcctttagttaagcttgaacagattaatgatttgagcagacttggaatatcttatcactttgaagatcaaattaaggcaatattaaacctgacatataataataataatgcattgtggaagaaagataatctgtatgccactgctcttcatttcaaactccttagacaatatggattcaatcctgtatcttcaggtattttcaatgctttcaaagacgagaaaaaggagttcaaagagagtttgagtaaggatgtgaaaggaatggtatgtctatatgaggcttcattctattcatttaggggtgaacccatattagatgaagcaagagatttcacaacaaaacatctcaaacaatacttgatgatgacgaggcaaggtaaaactgttgaccatgatgataataatgatttaatggtgaaattagtggagcatgctttggagcttccagtgcattggagaatgaaaaggttggaggcaaggtggtttattgatatgtatgctgaaatgtctcatcatcatcatatgaattcaacttttcttcaacttgctaaactagattttaacgttgtacaatcaacataccaagaagaccttaaacatgctgtaaggtggtggaaaactactagtctaggagaaaggttaccctttgcaagagataggatagttgaaacgttcttatggagtgtgggagttaaatttgagccacagtttagatattgccgaaaaatgctcacaaagatgggtcaattggtaacctcaatggacgatatatttgacgtgtatggtacgcttgatgagctaagcctctttcaagacgcattggaaaggtgggatataaatacgatagaccaacttccagattacatgaagatattttttttggctgcttataatgtggtgaatgaaatggcgtatgacgtgctaaaacaaaatgggattctcattatcaaatatttaaagaaaacgtggacggatttatgtaaatgttacatgttggaggcaaattggtatcatagtggatacacaccaagcttggaagaatacattaaaaatggatggatatcaattgcagaacccttaattctagtcaatctttattgccttataaccaatccaataaaagaagatgacatggactgcttgcttcaatatcccacctttattcgtatctcaggaatcattgctcgacttgttgatgatttaggaacttcatcggatgaactgaaaagaggagacaatcctaaatcgattcaatgctatatgaaagaaaatggtatttgtgatgaaaagaatggccgtgaacacataaggaatttaatcagtgaaacatggaaggaaatgaatgaagctcgagtgggtgagtctccattttctcaagcttttattgaaactgccatagatttcgttaggacagcaatgatgatataccaaaaggagcaagatggggttggtactaattttgatcattacacaaaagatggaatcatttccttgttcttcacttccattcccatttga

SEQ ID NO: 100 - DNA, 1881 bp, Artificial sequence
  Terpene Synthase Gene Nucleic acid sequence of the 45 identified gene products
atggctgcattagtgtccattgtaagtaatattattagctttaataataataataatactttcattagatcaaaccataatactaatattatttatagtaataaaaccctattaatgtctacaaataatagtaatattatttctcgaagatcagcaaactatcaacccccactttggcaatttgattatgtacaatcactttctactcctttcaaggatggagcatatgccaaaagagttgagaaagtaaaagaagaggtaagagtaatggtgaagagagcaagagaggaggagaagcctttatctcaacttgagctaattgatgtattgcaaagacttggaatctcttatcactttgaggatgaaattaatgatatattgaaacatatatataacaacaataatgtgtacaacaccaataataatgtgtatgccaattctcttgaatttagactcctacgacaacatggttatccggtgtctcaagaaatttttagtacgtgcaaagatgaaagaggcaattttatggtgtcttccaatgatgtcaaaggaatgttatctttatatgaagcttcattctatttggtagaaaatgaagatggcattttggaagagacaagacaaacaacaaagaaatatcttgaggaatacataatcatgatcatggaaaaacaacaatcattattagatcaaaataataataataatgattatgattatgataattatgattatgaactagtgagccatgcattggagcttccacttcattggagaatgttaagattggagagtaggtggtttattgatgtgtatgagaagagactagacatgaaccctactctacttaccttagctaaactagatttcaacattgtccaatcaatataccaagatgatcttaaacatgtcttcagctggtgggaaagcactggtatgggaaagaagttggaatttgcaagagatagaacaatggtgaatttcttatggacagtaggagttgcatttgagccacattacaaaaattttagaagaatgattacaaaagtaaatgctttaattacagtaatagatgacatatatgatgtttatggtacactagatgaattggagctcttcactaatgcagttgagagatgggatattagtgctatggatgggctccctgagtatatgaagacatgttttcttgctttatacaatttcataaatgatcttccatttgatgtgttaaaaggagaagaaggcctccatataataaaattccttcagaaatcgtgggcagatctttgcaaatcttatttaagagaagcaagatggtattataatggatacacaccaagctttgaagagtacattgagaatgcatggatatcaatatcaggacctgttatactatcacatttatacttttttgtagtgaatccaatcaaggaagataccttattaagtacttgctttgatggataccctaccataatacgacattcatcgatgattttacgacttaaagatgatatgggaacttcaacggatgaattgaaaagaggcgatgttcccaaatcaatccaatgcaaaatgtatgaagacggtatatctgaagaggaagctcgtcaacgtattaagttattaataagtgaaacatggaagcttattaataaagattacataaatttggatgatgatgatgatggtgatgactactctccaatgttctataagtctaataatattaataaggctttcattgaaatgtgtttaaaccttggtagaatggcacattgcatttatcaatatggagatggacatggaattcaagatcgccatacaaaagatcatgtactatcattacttattcaccctattcctcttacccaatag

SEQ ID NO: 101 - DNA, 1758 bp, Artificial sequence
  Terpene Synthase Gene Nucleic acid sequence of the 45 identified gene products
atgtcaaatattcaacatcaaatcttattatctttatctcaaaataataataataataatgagaaaattattatacacaaaaatgttgttgttcgaccaacaacaaaatttcacccttctatttggggagatcgattcctccattacaatgtatcacaacaacacttggtatgcaaagaagaacgagtgaaggaattagttgaagttgtaaggaaagagataatgatatcattattatcatcatgtgataataataataatgatattgatgagttaatgaagttaattgatagtgttcaacgtttgggattatcacaccattttgagactcaaatagaacaaatgttggaaagtgtttaccaatattattattattctactacaaaacatgatctaaactactacaaacatgatctacatcatgattctattatgtttagactattaagacaacatgggtttaaggtttcatcaagtatatttgagaaattcaaagacgagaaaggtaattttaagaaaagcttgataaccgatgtttcgggtttgcttagtttgtatgaggcttcctacttgagttatgttggagaaagcatactagatgaagcacttgctttcacaaccactcaccttaaggctattgtggcaaatagtaaagatcatccattatcacatcaaatatccaaagcattggaaaggccattaagaaagaccatagagaggcttcatgctaggttttatatctcaatctatgaaaaggatgcctctcataacaaagtattgctagaacttgcaaagttagatttcaatctacttcaatgtttccacaaaatggagcttagtgaaattatgaggtggtggaaaaagcatgactttgcaaacaaattcccttttgcaagagataggatggtggaactatatttttggatgttgggtatatattatgaacccaaatactctcgagcaagaaagctaacaaccaaaatctctgctttgatttcaatcacagatgatatatatgatgcatatggtacaattgatgagcttgagcttcttacccaagccatgcaaaggtgggacataaattttatagataaacttgagccagaatatttgaagacatattataaagcaatgttgacttcttatgaagaatttgaaaaagagtttacaaaggaagaattatacaaacatcaatatgcaaaagaacagatgaaaaaattgattcgagcttatttagaagaagctcgatggttgaacgatggatacttgccaagcttcgatgagcatttgagagtttcttatgtttcttgtgcttacacaacgttaatcgccacaagttatgtaggaatgtatgatattgtaacacatgaaactctaaattggctctccaaagaccctaaaattgtttcagcttccactctacttgctaggttcatggatgatattggttctcgcaagtttgagcaagagagaaatcacataccatctacagtggaatgttacatgaagcaatatggggtatcagaaaaagaggcaattgaagaactgaataaaagagtggtcaattattggaaagaaattaatgaagacttcattaggccaactgttatgcctttccctatcttagttcgtgttcttaatgttacaaaagtattggatcttctttacaaaaatggtgatgatcaatatacacatgttggaaaattgtttaaagaaagcattgctgctttacttatagatccaatccctgtactataa

SEQ ID NO: 102 - DNA, 1767 bp, Artificial sequence
  Terpene Synthase Gene Nucleic acid sequence of the 45 identified gene products
atgcaaatggcaggagtgaagttcattagctactcatctttatactcggctactttctcaaagaggccatcggttattagagaagtttattcactgaagaagaagaagaattataagcttcctcgttttggtaatccattattcatgtcaacaaaatgccagagtatatcatcatcatcatcaccaccaccattattgtcaatagatcatgatccagggatggtcgctgattattatgacaattataagagtactacctcggaagagctgttgatcaaaaaggttgaaatggcattacgaaaacctactgatgatcaaagttacaaaatgaggctcatagatagcatccaacggttgggagttggccattatttcgaagaagaaatcaaagtaatccttcagatgttgtcagatttcaattccggccaagatgacctctttaacacggggcttcgttttcggctactcaggcataatggctttccaactacctcagatgtttttgacaaattcatcaaccaaaaaggagaaatagaggatgtaataatgggccaagacacattgggtatgctgagcttgtatgaggcatcctaccttgcagcaaattgtgaagaatcattggtgaaggcaatggaattcacaagatctcatctgaaaagttcgatgcctttcataacccaaaagctacaaaatgaagttgccaaagccttggagctccctagacacctgaggatggcaccattagaagctcgaaactacatcgacgaatatggcaaagaattaaaccactgccctgctcttcttgacttagccaagttagaatttaacgagcttcagtcactccacaaaagagaattaaccgagatcataaggtggtggaaacagttgggtctggttgagaaacttggttttgcaagagatcgacccttagaatgttttctatgggtagtgggaatattccctgggaaatgctattccaacgtccggattgagctggccaaaactgtttcaatcttactagtcattgatgatatctacgacacttacggatctttggatgaactccacttgttcaatcatgcaattctaagatgggatcttggtgcaatggacaagcttcctgagtacatgaaaatatgttacatggcactatacaatactactaatgaaattggctacagagttctcaaagaacatggattatgcgttacacaacacttaaagaaagtgtggttagacatatttgatgcatttctaaccgaagcagaatggttcgacaaaaaatacactccaactctagagcaatatttaacaaacggcgtaactagtggaggatcctacatggccttagtgcactcatttttcctcataggtcatggtattacagaccaaactatatcaatgatgcacccatatcctgagatcttctcccactcaggcaaaattctaagactttgggatgatttgggaacagccaaggaggagcaagagagaggagatgttgcttctagcatagattgttatatgaaagaagagaatattgaatcggaagatgaggccagaaaacacatcaagaaactgattagaagctcgtggatagagctaaacggagagttgaaggctcctagtgcattgcctcggtcgatcaccacggcctgttttgaccttgctagaacagcccaagtcatctatcaacatggagatgatcaaagctttttaagcgtagaagatcatgtacaatctttgttttttcgaccctgtcaatga

SEQ ID NO: 103 - DNA, 3775 bp, Artificial sequence
  ABC+PTR Transporter nucleic acid sequence (of the 12 identified gene products)
atggataacaagaccaacaaacatcgcggcggtaacggcgacggtgacgataatgaagatcaagatcaagaagatactaaaaagaacaacaacaacaataacagcaacaaagtttcgttgcttaaactgtttagtttcgcagatttttacgattatgttttgatgggcattggtacaattggagccataattcatggagcttcggttcccattttctttatcttctttggaaaattaataaacgttattggaatggcttatctttttcccaaagaagcttcacacaaagttgccaagtattcgttggattttgtatatctaagtatagctatattgttttcatcatggacagaggtggcttgttggatgcatactggagaaagacaagcagcaaagatgagaatggcatatttgagagcaatgttaagtcaagatattagtctttttgatactgaagcttctactggtgaagttatttctgctattacaagtgatattattgttgttcaagatgcactttctgaaaaggtgggtaatttcttgcattacataagccgatttgtggtgggattcatagtagggtttgcaagggtttggcagataagtttggtgactctgtctatagtcccattaattgcattggctggaggtgtctacgcttatattgctaccggtcttattgctagggttcgaaaatcttatgtcaaggctggtgagatcgccgaagaggtaataggaaatgtgagaacggtgcaagcatttgcaggggaagaaaaggcagtgaaaatgtacacgtcagcacttgcccacacatacatgtacggacgaaaagcagggttggctaagggtttgggtttggggttcatgcattgcacccttttcctctcttggtctttgcttgtgtggtacgttagcattgttgtccataagagcatagccaatggcggcgagtctttcactaccatgcttaacgtcgtcatcgctggcctgtcattaggacaggcagctctagacatttctgcatttgttcgagctaaggcagcagcatatcccatattcgcgatgatagagaggaacactgcaagcaagtctagtgccatgagtggccgaaagttaggaaaactcgagggacacatccaattcaacaatgtgacatttagttatccatcaaggcctgatgtaacaatcttcaacaagttgtctcttgacattccttcggggaagattgttgctcttgtcgggggaagtggttcgggcaaaagcacagtcatttccctaatcgaacgcttctatgaacctctttcgggtgagatactattggatgggaacaatattaaagagcttgatctcaagtggatgaggcaacaaattggacttgttaatcaagagcctgcactctttgcaactagcattagggagaatattctttatgggaaagatgaggcttcacttgatgagatcactcgtgctgctaaactttctgaggctatttctttcattaacaacctccctgaaagatttgaaactcaggttggtgagagaggtatacaactctctggtggacaaaagcaaagaattgccatatcaagagccatagtgaagaatccatcaattcttttacttgatgaagctacaagtgccttagatgcagagtcagagaagagtgttcaagaggcacttgaccgtgtcatggtaggacgaacaaccgtcgtagttgctcatcgcctttccaccattagaaatgcagacataatagctgttgttcaagagggaaagatagttgaaacaggttgccatgatgaactcatttccaatccaaatagtgtctattcatcacttgttcaactccaagaagccgcgcctttgcagcgcaattctagcttaggacgcccaccgagcattaagttctcgagggaattatcgcgcacaacaactagttttggtgctagttttcggtctgataaagattctattagccgagttggtgctgatggaggagcagttgagcctgtaaagacaacaaatgtttcagctaaaagactgtattccatgattggaccagattggctttatggattgtgtggaactatctgtgcttttattgctggagctcaaatgcctctgtttgctcttggtatttcacatgctcttgtgtcatattacatggattgggacacaacaaaacatgaggtcaaaaagatatccatacttttctgttgtggggctgttgtaactgtcattgttcatggaattgagcatctttgtttcggtaccatgggagagcgccttactcttcgtgtgagggaaagaatgttttcggccatgttgaggaatgagatagcatggtttgatgacacaaacaacacgagctcaatgctctcgtcgcgattagaaagcgatgcaactctgttacgaacaatcgttgttgatcgctccacaattctgttacaaaatgttggtttggttgtggcctcattcatcatagctttcctcttgaattggaggatcacacttgttgtcttggcaacttatcctttggtcattagtggtcacatcagtgagaaactcttcatgcaaggctatggtggcaacttgagcaaagcatatctaaaagccaacatgttggcaggtgaagctgtgagcaatatcagaactgttgctgcattttgtgctgagcaaaaggtgcttgacctttatgctcgcgagcttgttgaaccgtccaagcgctcgttcactcgtggccagattgctggaatcttttatgggatttcacagtttttcatcttctcatcatatggccttgccttatggtatggttctgttttgatgggaaaagagctgagtagctttaaatctgtgatgaaatcattcatggttttgatagttactgcattagcaatgggagagacattggcattggctcctgatcttttgaaagggaatcaaatggttgcgtctgtgttcgaggtgttggaccgaaaaacagaagtaagcggggattcgggtgaagaattagcatcagttgatggtacaattgagctaagggacatccattttagctacccttcgagaccagatgttgttatatttaaggactttaatctaaaagttcgttcagggaagagtatggctttagtgggacaaagtggatcaggaaaaagctcagtaatttcaatcattctcaggttctatgatcctacatcagggaaggttcttattgatgggaaagacatgaagaaactaaagctaaaatcacttagaaaacacattggcttagtgcaacaagagccagcactttttgctacatcaatctatgaaaacatcctatatggaaaagaaggagcatccgaatcagaagtgatcgaagcagccaaactagccaatgctcacagtttcataagcgccttacccgaaggctactcaacaaaagtaggcgaaagaggtgttcaactctcaggaggccaaagacaaagagtagccattgcaagagctgtactaaaaaaccccgaaatccttttactcgacgaagcaacaagcgcgcttgatgttgaatctgaacgagttgttcaacaagctctagacagattaatgaagaacaggacaacaatcatggttgctcataggttgtctacaatcaaaaatgctgaccaaatttctgtcattcaagatgggaaaatcattgagcaaggaactcattcaactcttatagataacacaaatggaccttattataagttgataaacattcaacaacaacaacagcagcaactatagt

SEQ ID NO: 104 - DNA, 2175 bp, Artificial sequence
  ABC+PTR Transporter nucleic acid sequence (of the 12 identified gene products)
atggcttctgttactccctcaactactattgaccaagagcattatcataacaaaaaagttaccatttcacgaactactagtactacaagtagtaataataatactaatcatggaaaccctagaataacagtggtagagattgaaacagctaataatcgcaatgcgagttatcgtagttcgattttcggggctgatcatgaagttagtttgccagtagtggaagatcatcagggagttttcttgacatggcaggatttgtgggtgacagtttctagcggaaagaacagtaacagaccaattcttcggggtctgactggctatgctaagccaggggagctgttggctataatgggtccttctggttgtggcaaatctactctccttgatgcattggcaggcagattgaatgcaaacacaagacaaagtggggatatattgataaatggaaataaacagactctagcatatggaacatcggcatacgtaacacaagaggatactcttttaacgaccttaacggtaagagaagccgtacactactcagcacagttgcaacttccggactccatgtcttcagcggagaagaaggaaagagctgagatgactataagagagatgggtttaactgacgctgttaacactcgcatcggtggtagtgggttaggaactgggagcaaaggcctaagcggcggacagaagaggagagtgagcatctgcatagagattctcactcgtccaaagcttcttttccttgacgagcccactagtgggctcgacagtgctgcttcatactatgtgatgagcagcattgcgtcgttggatattcagagtcggaggggtggtggggccggtggtcggaggactgtggtggcttccatccaccagcccagttccgaagtgtttcagctttttaatactctttgccttctttctgctggtaaaattgtgtattttggtcctgctagtgcagctaatgagtttttcactatgagtggctttccttgtccatctctccaaaatccatctgatcatttcctaaaaacaataaacaaggattttgataaagtgcagaaggatcttgagcaaggtttaccaattagaggacgacctacagttgaagaagcaattgaaactcttgtaaagtcttataaagcatctgaaaattgccagctagttcaacaacaagtatcccaaatatgtaataaaaagaataagagcgtaggcttaatggagaagaagagaagccacgctggtttcataagccaatgtggtgtgttaacaagaagatcattcaaaaacatgtacagagatttgggttactactggtttcgtctagttatatatattggcttggctattggattgggcactatcttttgcaacattggccattctgacggatccgttgaggcaagagcttcacttatcatgtatgttgcttctttcttaactttcatgactattggtggattcccttcttttgttgaagacatgaaggtatttggaagagaaagactaaatggacactatagtgtaacatcatttgtaatgggtaacaccatatctgcacaaccatacctcgtccttatcgctctgataccaggtgctttagcttactttccgccaggactccgaggaggattcgaacacttcatctactttgtgttggttctctatgcttgcatgatgttggtcgagagcctaatgatgatagtggcagctctcgtccctaactttctcttggggatcatcacgggggctggaatccaagggtttatgatgttggcaggtggattttttcgcctcccaaatgaccttccagatcctttctggaggtaccctgtgttttatatttcgtttcatagatatgcatttcaaggattatataagaatgagttcaagggtttgatgttcgtggacgaaattcttggtaagtcacacaagattagtggggatgaaatcttgagaaataagtaccaagttaatatgagctattcgaagtgggttgattttgttttattgttgtcaatggtgtttgcttatcgtgttatgttcttgctcatcctcaaaatttctgagaattataagactatttctgctgcttttgcttttggacgacgcaagcctagtacacaagtcatggagaatcctactgccactccacctcatgcatag

SEQ ID NO: 105 - DNA, 2175 bp, Artificial sequence
  ABC+PTR Transporter nucleic acid sequence (of the 12 identified gene products)
atggcttctgttactccctcaactactattgaccaagaccattatcataacaaaaaagttaccatttcacgaactagtagtactacaagtagtagtaacactaatcatggaaaccctagaataacagtggtagagattgaaacagctaatcgcaatgcgagttatcgtagttcgattttcggggctgatcatgaagttagtttgccagtagtggaagatcatcagggagttttcttgacatggcaggatttgtgggtgacagtttctagcggaaagaacagtaacagaccaattcttcggggtctgactggctatgctaagccaggcgagctgttggctataatgggtccttctggttgtggcaaatctactctccttgatgcattggcaggtagatttgaatgcaacacaagacaaagtggggatatattgataaatggaaataaacagactctagcatacggaacatcggcatacgtaacacaagaggatactcttttaacgaccttaacggtaagagaagccgtacactactcagcacagttgcaacttccggactccatgtcttcagcggagaagaaggaaagagctgagatgactataagagagatgggtttaactgacgctgttaacactcgcatcggcggtagtgggttaggaactggaggcaaaggcctaagcggcggacagaagaggagagtgagcatctgcatagagattctccactcgtcaaagcttcttttccttgacgagcccactagtgggctcgacagtgctgcttcatactatgtgatgagcagcattgcgtcgttggatattcagagtcggaggggtggtgggcgcggtggtcggaggactgtggtggcttccatcaccagccagttcgaagtgtttcagctttttaatactcttttgccttctttcgctggtaaaattgtgtattttggtcctgctagtgcagctaatgaggtatttttcactatgagtggctttccttgtccatctctccaaaatccatctgatcacttcctaaaaacaataaacaaggattttgataaagtgcagaaggatcttgagcaaggtttaccaattagaggacgacctacagttgaagaagcaattgaaactcttgtaaagtcttataaagcatctgaaaattgccagctagttcaacaacaagtaatccaaatatgtaaaaaaaataagagcgtaggcttaatggagaagaagagaagccacgctggtttcataagccaatgtggtgtgttaactagaagatcattcaaaaacatgtacagagatttgggttactactggtttcgtctagttatatatattggcttggctattggattgggcactatcttttgcaacatcggccattctgacggatccgttgaggcaagagcttcacttatcatgtatgttgcttctttcttaactttcatgactattggtggattcccttcttttgttgaagacatgaaggtatttggaagagaaagactaaatggacactatagcgtaacatcatttgtaatgggtaacaccatatctgcacaaccatacctcgtccttatcgctctgataccaggtgctttagcttactttccgccaggactccgaggaggattcgaacacttcatctactttgtgttggttctctatgcttgcatgatgttggtcgagagcctaatgatgatagtggcagctctcgtccccaactttctcttggggatcatcacgggggctggaatccaagggtttatgatgttggcaggtggattttttcgcctgccaaatgaccttccagatcctttctggaggtaccctgtgttttatatttcgtttcataggtatgcatttcaaggattatataagaatgagttcaagggtttgatgttcgtggacgaaattcttggtaagtcccacaagattagtggggatgaaatcttgagaaataagtaccaagttaatatgagctattcgaagtgggttgattttgttttattgttgtcaatggtgcttgcttatcgtgttatgttcttgctcatcctcaaaatttctgagaattataagactatttctgctgcttttgcttttggacgacgcaagcctagtacacaagtcatggagaatcctactgccactcccctcatccatagaagagtttag

SEQ ID NO: 106 - DNA, 4290 bp, Artificial sequence
  ABC+PTR Transporter nucleic acid sequence (of the 12 identified gene products)
atggagagtaatgatatatacagaggcagcaacagtatgagaagtggtagcagttctttatggaggaacaacaacatggaagttttctctaaatcctcaagggatgaagacgatgaagaagctctcaaatgggctgctcttgaaaagcttccaacttactctcgtttgagaaaaggcattttcactacctccaaaggtgaatccaatgaagttgatatacataatcttggctttcaacaaaggaaggatttgcttgagagacttgttaaggttgctgaggaagataatgaaaggtttttgttgaagctcaaaaatcgtatcgacagggttggacttgatgttccaactattgaagtgagatttgagcatgttaatgtggaggcagatgttcatgttggaagcagagctttgccttcattcattaacttctccattaatatcttcgagagtgtactgggatttctgcctattttcaataccaaaaagaaacatcttaatatccttcaagatgttagcggagttataaagccaggaagattgaccttgctattgggacctccaagctctggcaagaccacacttttattgactctggcaggaaagcttgcctctgaattaaagttttcagggagggtgacatataatggacatgatatgaatgagttcattccccaaagaacagcagcctatattagtcaacatgatgtccatatcggagaaatgacagtaagagaaactctgtctttttcggcaagatttcagggagttggtactcgttatgacatgctatctgaattgtctagaagagagagagaagcaaatatcaaacctgatacagatattgatgtgtacatgaaggcagcagcactagaaggcgaagagacaagtgtaatgacagattatgttcttaagattcttggtttggaagtatgtgctgatataatggtaggggatgaaatgctaaggggtatttctggaggacagaggaagcgtgtcacaactggggagatgcttgttggaccagctggtgtattgttaatggacgagatttcaactggtttggacagttcaactacgtttcagattgtgaactcactcaagcaatatgttcacatctttaatggaactaatgtcatctctttactccagccagcaccagagacttatgatctttttgatgatattattcttctatctgatggtcagattgtgtatcaaggtccacgagaaaatgtgctttcattctttgaagccatggggttcaaatgtcctgaaagaaaaggtgtagcagactttcttcaagaggtaacatcaaggaaagatcaagctcaatattgggcaagaaaagatcagccttataggtatgtgaaagtcaaggattttgctgaggcattcaaatcattccatgtggggcagacaataggagatcatctttcaactccatacgataagagcaagaatcatcctgctgctttgacaaccaaaaactatggtgtaaagaagaaagagttcctgaaagcttgtttctcaagagaatatttgctcatgaagagaaactcatttgtctacatcttcaagattgtacaacttgtgttcatggcgctgattgctacaacacttttcttgagaactgagatgaaacgtaatactgtagatgatggtggaatttaccttggtgctttgttcttcactgtaataatgattatgttcaatggaatgtcagagattccaatgaccattgctaagcttccagtgttttacaagcaaagggacctgcagttctatccagcttgggcatatgctcttccatcttggattctcaagatcccaataactttggtagaagtagcagtatgggtggccattacatactattcaatgggactagatccaaatgttggaagattgtttcggcaatatgtggctctgatatttgctaatcagatgtcctcagcattattccgagctactgcagctactggtaggaacatgatcgtagccaacacatttggtacatttgtgcttgttatgcttataactttgggtggtttcgttctctctaaagatgacataaagggctggtggatttggggttactggacgtcacctctaatgtatggtcaaactgctgttcttgttaacgagtttcttggagaaaactggagacataccggaccaaactcaacaaaacctcttggaattcaagtcttggaatcaagagggttctttactagaggatattggtactggcttggtttgggagcaatgacaggattcattattatactaaacattttatacacagtggctctcacttaccttaacccttttgagaaagcacaatctgtcaaatctgaagatcctgaaaacgatatccaagatgataacagggccactgaaatgcagcaacgatcaaataatagtccgaacattggtgaaaatcaaattgcaaagaaaggaatgattctgccatttgagccacattccatttcttttgacgatgttatttactcagtggatatgccacaggaaatgaagactcaaggtgtgggtgaagataaacttgttctactaaaaggtgttagtggtagttttaggcctggtgtgttgacagcactgatgggagttagtggagctggtaagaccactttgatggatgtgcttgctggtagaaaaactggtggatacattgagggtgatgttagaatctctggttaccctaagaagcaagaaacatttgcccgaatttctggatattgtgagcaaaatgacatccattcacctcatgttacaatttatgagtcattgctttactcagcatggcttcgtttaccagctgaagttgattctaaaaagagagagatgttcattgaggaagtgatggagcttgttgaactcgctccacttagacaagcacttgttggattgcctggggtgaatggtctctcaactgagcaaagaaaaagactaaccattgcagttgagttagtggcaaacccttctataatattcatggatgaaccaacttcagggctagatgccagggctgctgctattgttatgagaacagttaggaacacagtggatactggcagaacagttgtgtgcacaattcatcaaccaagtattgatatctttgaagcctttgatgagctattccttatgaaaagaggaggagaagaaatatatgtggggccattaggtcgacattcttgccatcttatcagctattttgaggcaattgaaggtgtcagcaaagtcaaagatggttataatcctgcaacttggatgttagaggtttcgagttccgcccaagaacttgctttgggagttgatttcaacaaaatttacaagagctcggaactatataggagtaacaaacagcttattaaagagttgagcatccctgctcctggttcaaaggatcttcacttcgctactcaatactctcgctcatctttcactcaatgcattgcttgcttatggaaacaacgtcggtcttactggcgaaacccgccttatactgctgtgagatttatgtttaccactttcatagccttgatgtttggaacaatattctgggacttaggatctaaaaggacaagacaacaagatatcattaattcaatgggatcaatgtatagtgcagtgttcttcatagggatgcaaaatgctgcatctgtacagccagtagtttccattgaaagaacagtcttttacagagaaagagctgcaggaatgtactcagcttttccctacacatttggacaggtggtagtggagattccatacattttctttcaagctgcagtatattgcctaatagtatacgcaatgatcggatacgaatggactgcagcaaaattcttttggtatctgttttacaccttctttgctatgctctacttcactttttatggcatgatgtgtgtgggagtcactcctaaccatcacattgcttccatcgtttcttctgccttctatggattatggaacatcttcgctggctttatcgtccctcgaaccaggataccaatatggtggaggtggtactattgggcttgtccagttgcatggactctatacggattggtgacatcacaatatggagatttacacgaatacatcattattgagacaggcgagactttaccgcagtttctgagacgattttttggatatagacatgatttcttggaagttgttgcagtcgtcaatgtcgcctttacattgatcttcgcaatcagctttgcatttgctatcaagaccttcaatttccaaaaccgatag

SEQ ID NO: 107 - DNA, 4380 bp, Artificial sequence
  ABC+PTR Transporter nucleic acid sequence (of the 12 identified gene products)
atggagatgagtattaggagttctagtagtagaaattcctcatggagaaacaatagcaatagggtctttgaaaggttaccttctttctcaagaagagaagaagaagaagatgatcttcaatggtttgcacttgaaaagcttccaacatataatcgtttgagaaaaggtttacttataacaacatctacaggagaagctgccactcatgagattattgatattcataatcttggactcaatcaaaggaagagtttgattgagaggttggttaccattgctgatgagggtaatcaaaaatttttgctcaaactcaagaatcgaattgatagagttggaataaaactacccacaattgaagttcgatttgagcatcttaatgttgagacagatgcttatgtaggaagcagagctttgccaaccttcttcaacgcatacattaatatatttgagcgtttattgactcatttacatattctttcaagtagaaagaaacatttgaaaatccttgatgatgttagtggaatcataaagccaggcagaatgacattgttgttaggtcctccaagttctgggaaaaccactttattattggctttggcaggaaagcttgaccagaatttgaagttttctggaagggtgacttataatgggcatgacatggacgagttcataccgcgaagaactgctgcctacatcagccaatacgatgaacatattggagaaatgactgtgagagaaaccttggccttctctgcaagatgtcaaggtgttggatcacgttatgacatgttatctgagctatcaagaagagaagaagaagctaatatcaagcctgatctagaccttgatgtttacatgaaggctacagcaatagaaggtcaagagacgaatgtagtgacagattatattttaagaattttggggttggaagtttgtgctgatacaatggtgggagatggaatgttaaggggtatatcaggtggacaaagaaaacgtgtaaccactggtgagatgcttgttggaccggcaaatgctctgttcatggatgagatatcttctggtttggatagctcaaccacataccaaatagtgaactctctcaaacaaaatgttcacattttgaatggaactactgtcatctctctactccagcctgcacctgagacattcgaacttttcgacgatgtcattcttttatctgatggcaaaattgtgtatcaaggtccgcgtcaacaagtgcttgaattttttgaatttatggggttcaagtgtcctgagaggaaaggtgttgctgactttctccaagaggtgacatcaaagaaagatcaagagaagtattgggtacgagataatgaggcttacagattcattactgtcaaggaatttgctgacgcatatcgatcgttcaaagtgggactaaaacttgaagatgagcttgcaactccctttgacaagagaaagaatcacaaagctgctttgacaactaaaatatacggtgtgaaaaagatagagctgctcaaagcttgcttctcaagagaattattgcttatgaaaagaaattcttttgtctacatcttcaagcttgctcagcttgcaatatcggcactgattgcaaccacagtcttctttcgaactaagatgtctcataattcagtagaagatggtggaatttacattggtgcattgttcttctctgtgggtgcaactatgttcaatggaatgtcagagatctctatgactatagctaagcttccagtcttttacaagcaaaggaactttctgttttttccatcatgggcatatgctcttccaacatggattctcaagatacctatatcgtttctagaagtcgcggtttggatgttaataacatattatcccattggttttgatccaaacataggaaggttctttaaacaatatcttctgttagttgctgtaagtcagatggcctccggcatgtgtcggtttgtaggaggtataactagagacatgatcaccggtggcacggtcagttcgcttatgtttctcatgctttttggattaggtggatttgtgctgtcaagagatgatattaagaaatggtggatttggggttactggatttcacctatgatgtatggtcagaatgcattggtggttaatgagtttcttgggagaagttggagccatgctaaacccaattcaacagaaccactgggaattgcagttctcaagtctcgagctttctttgttcatgcatattggtattggcttggtttaggagcactgatcgctttcgtcttagttttcaacattttttacagtttagctcttacttaccttgactccatcggaaggccgcaagctgttaagtgggaagatagtgagatcaacgatgataatgactcatcaagccacaaaactcagaaaggtaaaatcaattacgtttgtgtatttccttgtgatccagtaagaagagaggatgttaggagcagagcttctgagcagagaagaggaatgattcttccttttgaaccacattccatttcatttgataatgtcacatactctggaatgattcttccttttgaaccacattccatttcatttgataatgtcacatactctgtcgacatgccagaggaaatgaaaaatcacggtgtcttagacgataagctggttctcctgaatggcataagtggttgttttaggcctggtgttttgacagcattaatgggagttagtggtgctggtaaaaccactttgatggatgttctggctggaaggaaaactggtggatatgttgaaggggatatcagaatctccggttaccctaagaatcaggaaacatttacccgaatatcaggatattgcgagcaaaacgatattcactcgccacatgttactgtctatgagtccttgctctactctgcatggcttcgtttaccatcaaatgttgattcagaaaccagaaagttgtttattgaggaagtgatggagcttgtggaactctctccactaagacaagcactagttggattgcctggagtcaatggtctctccaccgagcagcgaaaaagattgaccattgcagttgagctagtcgcaaacccctctatagtattcatggatgagccaacttccggattagatgctagagctgctgcaattgtcatgagaacagttaggaacacagttgatacaggcagaacagttgtgtgcacaattcatcagccaagcattgacatatttgacgctttcgacgagttgctacttttgaagagaggaggagaagaaatatatgttgggccattaggtcgacattcttgccatttaatcaattactttgagggaatcaatggtgttagtagcataaaagctggctccaacccagcaacatggatgttagaagtcaccacttcagcacaagaaatggctttaggggttgattttgctgaaatatacaagaactcagaactatacaggagaaacaaagaagccatcaaaggatttagcataccttctcctgggtcagcagaactccatttcccttctaaatattcccagccatttctcacccaatgcatggcttgtttatggaagcagcacaagtcttactggcgaaacccaccatacaccgccgttaggttgctcttcagcactatcggagccttaatgtttgggacaatgttctgggatctgggatcaaaaaggaaacggcaacaaaccttaatgaatgcaattgggtccatgtacgcagctcttcccttcgctggttcccaaaatgcaagctctgtgcaaccagtagtttcaatagaaagaacagttttttacagagaaagagctgcagggatgtattcaccttttccctatacattagctcaggtgattattgaaatcccatacaatttcgtccaagcaacactttataccatcatagtatatacaatgataggattcgaactaaatctagttaaattcatatggaacctgttctttacattcttcacattgtcgtactacacctactacggcatgatgacggtggcagcaactccgaattaccacatcgcttcagtcgtttcatccgcattttacggaatctggaacttgttttcaggattcgtgatcccaagaaccaggattccgatatggtggagatggtactactgggggtgtccgatagcgtggagcttgtacggattggtggtatcgcagtatggtgatgtaaaggaagaaatggacaatggtgagagtgtagaagaattcgtgagacgttactatgggtatgatcgagaatttcttcctgtggttgctatcgtcaatgtggctttcactgtcaccttcgccttcatctttgcactttcccttaaggcattcaattttgagaggagataa

SEQ ID NO: 108 - DNA, 4320 bp, Artificial sequence
  ABC+PTR Transporter nucleic acid sequence (of the 12 identified gene products)
atggagggagctgatttatacagagcgggtaatagcctgcgaaatagcatgagaagtacgagtagttcgttatggaggaacaataacatggaggttttctctaaatcttcaagggaagaagatgatgaagatgctctcaaatgggctgctcttgaaaagcttccaacttattctcgtttgagaaaaggcattcttactacctctaaaggagaatcaaacgaggttgatatacataatcttggttttaaagaaaggaaagatttgcttgagagattggtcaaagttgcagaagaagataatgaaaggtttttgttgaagctcagaaatcgtattgatagggttggacttgatcttccaactattgaagtgagatttgagcaagttaatgtggaagcagatgttcatattggaagcagagctttaccttcattcattaatttcaccattaatatatttgagggtctactgggatttctgcctattttcaatagcaaaaagaaacatcttaacatccttaacgatgttagtggagttataaagccaggaagattgacattgctattgggtcctccaagttctggcaagacaacacttttattgactctggcaggaaagcttgccaaggatttaaagttttctgggagggtgacttataatggacatgagatgaatgagtttgtacctgtaagaacagctgcctatattagtcagcatgatgtccatattggagaaatgactgtaagagaaactttgtctttctctgcaagatgccaaggagttggaactcgtttcgacatgctagctgaattagctagaagagagaaagaagcaaatatcaaacctgatgcagatattgatgtctacatgaaggcagttgcgacagaaggacaagagacaaatgtcgtgacagattacgtccttaagattcttggtttggaagtatgtgctgatacaatggtgggagatgaaatgctaaggggtatctctggaggacagaggaagcgtgtcacaactggggagatgcttgttggcccagcaggggtgttgttcatggatgagatctcaactggtttggacagttcaactacgtaccagattgtgaactcactgaagcaatatgttcacatctttaatggaactaatgtcatctctttactacaaccagcacccgagacttatgatctttttgacgatatcattcttctatctgatggccagatagtgtatcagggtccacgtgaaaatgtgcttgctttctttgaatctatgggtttcaaatgccctgagagaaaaggtgttgcggactttcttcaagaggtaacatcaaggaaagatcagggccagtattgggcaagaagagatcaaccttacaggtatgtcactgtcaaggaatttgctgagtctttccaatcattccatgtggggcagaaaataggggatcatcttgcaactccatatgacaaaagcaaaaatcatcctgctgctttgacaaccaaaagctatggtgtcaaaaagaaagagttcataaaagcttgcttctcaagagaatatttgctcatgcagagaaactcatttgtctacatcttcaagcttgtacaacttgcgataatggctctggtagctacaacacttttcttaagaacagagatgaatcgcaatactgtagaagatggtggaatttacctcggtgctttgttcttcactgtgataatggttatgttcaatggtatgtcagaacttcctatgaccattgccaagcttccagtgttttacaagcaaagggacctccagttctaccctgcttgggcatatgctcttccatcttggattctgaagatccctatagcttttctagaagtagcagtttgggtagccattacatattattcaattggattagacccaagtgttggaaggttgtttcggcaatatcttgcactgatatttgttaatcagatggcctcagcattgttccgagctactgcagctacgggtaggaacatgatcatagccaacacatttgggtcatttgtgttgctcttgctcttcacactgggtggttttgtgttgtctagagatgatatcaagagctggtggatttggggttattgggtgtcacctctaatgtacggtcagactgcagttttagttaatgaattccttggggaaaaatggagacgtgtgttaccaggctcaaccgaatctcttggtgttgaagtcttaaaatcgcgaggtttctttactgaagcatactggtattggattggtttggcggggttgactggtttcattattttgctaaaccttttgtacatgctggctcttactttccttaacccactagaaaatgcaaaaagtgttaaatcagatgattctgagaatgatgttcaagatagtagagccaggggtgccattgaaatgaaccaaagagcaaatagctcaagccatcactctcagaccgtcgatgaaagtatcaatgccaaaaaaggaatgatccttccatttgagccacattctatttgttttgatgatgtaatctactcagtagacatgccacaggaaatgaagagccaaggtgtggttgaggataaattggttctattaaagggtgttagtggtagttttaggcctggtgtgttgacagcactgatgggagttagtggagctggtaagaccactttgatggatgttcttgctggtagaaaaaccggtggatatattgagggcgatgttagaatttctggctaccctaagaagcaagaaacatttgcaagaatttctggatattgtgagcaaaatgacatccattcacctcatgttaccatttacgagtcattgctctactcagcatggcttcgtttaccagcagaagttgattctgaaaagagaaggatgtttattgaggaagtgatggagcttgtggaacttacttcactgagacaagcactagttggattgcctggagtgaatggtctctcaaccgagcagcgaaaaaggttgactattgcggttgagttggtggcaaatccttctataatattcatggatgaaccaacatcagggctggatgccagagctgctgcaattgttatgagaacagttaggaacacagtggacactggcagaactgttgtgtgcacaattcatcaaccaagtattgacatctttgaagccttcgatgagctattccttatgaaaagaggaggagaagagatatacgtggggccattaggtcgacattcttgccatctgatcaactattttgaggctattgaaggtgtcagcaaaatcagagatggttataatcctgcaacttggatgttggaggtttcgagttcggcccaagaaatatctttgggagttgattttactaaagtttacaagggttctgaattatacaggagaaacaaacaacttattaaagagctaagcacccctgctcctggttctaaggatctttacttccctactcaatactctcgctcatttgtcactcagtgtatggcttgcttatggaaacaacggctgtcgtactggagaaacccgccttatactgctgtgagatttattttcaccactttcatagccttgacatttgggacaatgttctgggacttaggatctaagaggtcaaaacaacaagatctcatcaatgcaatgggatcaatgtacgctgcagtcttcttcatcggggtccaaaacgcttcatctgtacagccggtagtttccatagaaagaacagtcttttacagagaaaaagctgcaggaatgtattctgcttttccctacacatttggacaggctgtggttgagattccatacattttgtgtcaagctttggtttattgcctcatagtatactcgatgattaacttcgaatggactgctgcaaaattcttttggtatctgttttatacattctttgctatgctctacttcactttctatggtatgatgactgtggcaatcactccaaaccatcacattgcttccattgtttcctctgccttctacggagtatggaacctcttctctggattcgtcgtccctcgcactaggatgccaatatggtggagatggtattactatgcttgcccggttgcatggactttgtatggattggtggcttcacaatatggagatgttaccgaagttcttaaccaggaaacaggcgagacggtacaacagtttctgagacgattttacgggttcaaacatgattacttgggagtcgttgcagttgtcaatgttgcatttgcattgttcttcggaatcatctttgcctttgctgttaaggccctcaatttccaaaagcgatag

SEQ ID NO: 109 - DNA, 4275 bp, Artificial sequence
  ABC+PTR Transporter nucleic acid sequence (of the 12 identified gene products)
atggatggtggtgatgtatacagagcagggaacagtttaagaaatagtatgagaaatggtagcacttccttatggaggaacaataacatggaagttttctccaaatcttcaagggaagaagatgatgaagatgcccttaaatgggctgctcttgaaaagcttccaacttattctcgtttgaggaaaggaattcttactacttccaaaggtgaatccaatgaggttgatattcatgaacttggctttaaagaaagaaagaatttacttgagagacttgttaaagttgctgaggaagataatgaaaagttcttgttcaagctcaaaaatcgtatagacagggttggacttgatgttccaactattgaagtgagatttgaacatgttaatgttgaggcagagattcatgttggaagtagagctttgccttcatttattaacttctccattaatattgtcgagggtctattgggatttctgcctattttcaataccaaaaagaaacatcttaatattcttgaagatgttagtggagttataaagccaggaagattgacattgctgttgggacctccaagctctggcaaaaccacacttttattgactctagcaggaaagcttgcctctgaattaaagttttctgggagagtgacatataatggacatgaaatgaatgagttcattcctcaaagaacagctgcttatatcagtcaacatgatgttcatattggggaaatgactgtaagagaaactctctctttttcagcaagatgccaaggagttggaactcgttatgacatgttatctgaattgtctagaagagaaagagaagcaaatatcaaacctgatcctgatgttgatgtgtacatgaaggcagcagcaattgagggccaagagacaagtgtaatgacagattatgttcttaagattcttggtttggaagtatgtgctgatacaatggtaggtgatgaaatgctgaggggtatttctggaggacagaggaagcgtgtcacaactggggagatgcttgttgggccagcaggagtattgctcatggatgagatttcaactggtttagacagttcaactacatttcagattgtgaactcactgaagcaatatgttcacatcttcaatggaactaatgtcatctcattactccaaccagcaccagagacatatgatctttttgatgatatcattcttctatctgatggtcagattgtgtatcagggtcctcgtgaaaatgtgctttctttctttgaatctatgggcttcaaatgtcctgagagaaaaggtgtagcagactttcttcaagaggtaacatcaaggaaagatcaagctcagtattgggcaagaagagagcaaccttacaggtatgtgacagtcaaggaatttgctgaggcattcaaatcattccatgttgggcagagaatagatgattaccttttaactccatatgacaagagcaagaatcatcctgctgctttgacaaccaaaaactatggtgtcagcaagaaagagttcctcaaagcttgcttctcaagagaatatttgctcatgcacagaaactcatttgtctacatcttcaagcttatacaacttacattcatggctctggttgctacaactcttttcttaagaactgagatgcatcgtaatacagtggatgatggttcaatttaccttggttcattgttcttcactgctgttatgattatgttcaatggaatgtcagagcttccaatgaccattgctaaacttccagtgttttacaaacaaagggacttgcaattctatcctgcttgggcatatgctcttccatcttggattctcaagatcccaataacttttctagaagtaggagtatgggtggccataacatactattccattggattagacccaaatgttggaagattgtttcgacaatatcttgtgttgatattcattaatcagatggcgtcagcgttattccgagctactgcagctaccggtaggaacatgatcatagctaacacatttgggtcatttgtgttggttatgcttgtgactttgggtggttttgttctgtctagagatgacattaagggttggtggatatggggttactggatctcacctctaatgtatggccaaactgctgttcttgttaatgagttccttgggcaaaaatggagacatactggaccaaactcaacacaacctcttggaattcaagtcttggaatcaagagggttctttactagaggatattggtattggcttggtttgggagcattgattggattcattattatactgaatattttatacactttggctctcacttacctcaacccttttgagaaatcacagtctgttaaagctgaagatactgagaatgatatccaagatgggcagcaaaatagttcaaacattggtgaaaatcaagttgcaaagaaaggaatgattcttccatttgagccgcattccatttctttcgacgatgttgtttactcagtggatatgccacaggaaatgaagaatcaaggtgtggttgatgataaacttgttctgctaaaaggggttagtggtagttttaggcctggtgtgctgacagcactgatgggagttagtggagctggtaagaccactttgatggatgttcttgctggtagaaaaaccggtggatacattgagggcgatgttaggatctccggttaccctaagaaccaacaaacatttgcccgaatttctggatattgtgagcaaaatgacatccattcacctcatgttacaatttatgagtcattggtctactcagcatggcttcgtttaccagctgaagttgattctgaaaaaagaaagatgtttattgaggaagtaatggagcttgtggaactcactccacttagacaagcactagttggattgcctggggtgaatggtctgtcaactgagcaaagaaaaaggttgacaattgcagttgagttagtggcaaatccttctataatattcatggatgaaccaacttcagggctggatgccagagctgctgctattgttatgagaacagttaggaacacagtggatactggcagaactgttgtgtgcacaattcatcaaccaagtattgacatctttgaagcctttgatgagctattccttatgaaaagagggggagaagagatatatgtggggccattaggtcgacattcttgccatctagtcaactattttgaggctattgaaggtgttagcaaaatcaaagatggttataatcctgcaacttggatgttagaagtttcgagttctgcccaagaaatagctttgggagttgattttaataaaatttacaagagttctgaactatacaggagtaacaaacaacttatcaaagagttaagcacacctgctcctgattcaaatgatctttacttccctactcaatactctcgctcattttacactcaatgcattgcttgcttatggaaacaacggttgtcttactggagaaacccgccttatactgctgttagattcatgtttaccgctttcataggcttgatgtttggaacaatgttctgggacttgggatctaaaaagtcaagacaacaagatatcataaattcaatgggatcaatgtacgctgcagtgttctttattggggtccaaaatgcttcatctgtacaaccagtagtgtccattgaaagaactgtcttttacagagaaagagctgctggaatgtactcatgttttccctactcattcggacaggtggtagtggagattccatacattttcattcaagcatcagtatattgcttgatagtatatgcaatgattggatttgaatggactgctgcaaagtttttctggtatctatttttcacattctttgctatgctctacttcactttctacggcatgatgactgtgggagtcactcccaaccatcacattgcttccattgtttcttctgccttctatggattatggaatatcttcgccggcttcgtcgtccctcgcaccaggataccaatatggtggaggtggtactactggggttgtcctgttgcatggactctgtacggactagtggcatcacagtatggagatttaagcgaagacatcattgctgagacaggtgagagtgtagaacagtttcttcgacgcttttttggattcagacatgatttcttggaatttgttgcactcgccaatgtcgcctttgctgtcctctttgcaatcatctttgccttttctattaagctcttcaatttccaaagccgataa

SEQ ID NO: 110 - DNA, 1707 bp, Artificial sequence
  ABC+PTR Transporter nucleic acid sequence (of the 12 identified gene products)
atgaatatggaggtcatgagcagagactttgatcaaagtggtggtggcaaacgaggaggaaacagagctgcattttttgtatatataatggaaggactggaaagcatggcgtttatatcaaactcagcaagcctggtgatatatttcttcagctacatgaattacagcttaacaaaatcgtcgaccatgctcaccaatctcttaggaactgccactttactctccctcctcggcggttttatatctgacacctatttaaccagatttgcaaccactcttattttcgcttcaattgaattaatgggatatatagttctgctagtgcaagcccaccgttcggatctaagaccaccaaagtgcctaagcataacacaccaatgcgaaggtgcatcagcaggggaagcagcaatcctatacacagggctgtatcttatggcccttggaacaggtggagtcaaagcagctctcccagctttaggtgctgaccagtttgacccaaaaaaagctaagcagttgtctacttactttaactggttcattttcagccttaccattggttcaatcttgggtgtcactttggttgtatggataagcacagataagggctgggattgggcctttgccgtttgcgctatagctcttttactttccatctttttcatttctttgggcaaccccttctatcggaataaccttccaaaaggaagcccactccttcgttttctaagggttttcgtggcctcttttcgaaatcgaaaacttcccattccagaaaatgcagatgaattacatgagatttatcaggacaaagaagatgataacttacatcatgaaatccttcaaagaacagaccaattcaagttcttggacagagcagctgtgataagaagaacagaagatgatgataatgatggtagtaattcaggatcagaatggagagtgtgtacagtaactgaagtggaagagacaaagatcctaatacggatgctaccaatcatactaaccacaatcttcatgaacacatgcttagcacaactccaaaccttctcagtccaacagagcgtaacaatggacagagatttcattggcttcgaaatccccggaccctcagtcccagccattcctttgctctttatgttcattctcatcccattatacgacagagtctttgtcccaatagcaagaagagttacgggtattcccaccggcattagccacctccagcgcattggtattggcttagttctctctgctatctccatgacagttgccgggtttgtagaaaagaagcgcagaaacgtcgcgattcagcatgacatggtcgatagccaagatgccttgcccataagtgttttctggcttggttaccaatacgctatatttggggcggctgacatgtttaccctggtggggatgttggaattcttctatgctgagagctcggcgggaatgaaggcgctgagcaccgccatctcgtggtgctcgttggctttcgggtactacttgagctctgtggtggtggagattgtgaacaaggttagtgggggttggttagcaaacaataatctaaatagggataagttggaaaacttttactggttgttggcagggttgagtgttgtaaattttggggtttatgtcatgtgtgcatcttggtacaagtataagaatgtggaaatgatcaagaaagatgatgcttctacttaa

SEQ ID NO: 111 - DNA, 1755 bp, Artificial sequence
  ABC+PTR Transporter nucleic acid sequence (of the 12 identified gene products)
atgaacagtagagattttgaagttggctctaaatcatccaataatgatgagacgaataagaacaaagcattaataagtaaaaagcaaggaggaaatagagctgcactatttgtatatgcaacggagggtttggagaacatggcgttcattgccatagcagtaagcttagtgacttacttctatggttacatgaattacagcttgacgaaatcatcaaccatgctcaccaattttatgggaacttcttttctgttggcactcgtaggtggattcatatgtgatacatatttaaccagattcaaaacttgtctcatcttcgcctccttcgaattgctgggatatacacttttactggtgcaagcccatcgaagtgaactaaggcccccaaaatgcgtagataatattaatcaccaatgcgtagaagcaaccacaggagaggcctcaatcctatacgtggggctctaccttgttgctctggggactggaggaatcaaagcagcactcccatcattgggtgctgaccagttcgatgagagggatccaaaggagtcgagtcaattgtcgagtttcttcaactggttcttgttcagcctcaccattggagcaatctttggtgtaacggtggtggtttggataagcaccaataagggatgggatcgtggctttgctgtttgccttgtagctgtcttctttgcccttctttctcttactttcggcaaatctttgtatcgccataacgttcccaaaggaagcccactcctccgttttataagagtagttttcgtggctagtattaaaaatcgtaagcttcctattccagagaattcagatgaactatatgagattggagaagacaaagaagctgcaatattaaataaccatcaagaattccttcaaagaacagaccaattcaagtgcttggaccgagcagcagtgataaggacagatggtataacaggaaaatggagagtgtgcacagttactgaagttgaagaaacaaagatattagttagaatgcttcccattatactaagcacagtcttcatgaacacatgcttggcacaactccaaacattctcagttcaacaaggcaccacaatggacacaaccatcaatggctttgaagttccagcagcctcaatcccagtcatcccactcctcttcatgttcattctcatcccaatttatgacaagatcttcgtccccattgctcgaagaattactggcattcccacaggtattcgccaccttcagcgcataggagtaggcctagtcctctcagctatttctatgactgtagcgggaatagtagaaaagaagagaaagaatgttgccattgagcatggcatggtcgatagcctcgctcccttaccaataagtttgctctggctagggtttcaatatgcgatatttggagcagcggatatgtttactttggtgggtttgcttgaattcttctacgctgaaagctcggcaggaatgaagtctctgagcacagcaatctcttggtgctctttcgcctttgggtactacttgagcacggttgtggtggagattgtgaacaaggtgagtggtggatggttagccaataataatctcaacagggataagttggaatatttctactggctgttggctgggttgagtgtggtgaattttggagtttatgtgttgtgtgcatcttggtatagatacaaaaagttggaagtaccagtggtcgagaaaaatgatgtcttgaaggaaattaaaccttga

SEQ ID NO: 112 - DNA, 4317 bp, Artificial sequence
  ABC+PTR Transporter nucleic acid sequence (of the 12 identified gene products)
atggaggtgggagatctgtataaagctggaaacagcttgagaagtagtaagggttcatcagtgtggagaggcaataataataataataataataaagatgagtttttctcaaagtctagaagagaagatgatatagatgatgaagaagctcttacttgggctgcactagaaaagcttccaacttatgatcgtttaagaaaagggattttgactacttctaaaggaaagccaactgaggttgatgtaatcaatcttggttctaaagaaagaaaagatttgcttcgtagattggttaatgttgctgacgaagataatgaatcttttttgttgaagctcaaacaacgcatccaaacggttggaattgagcttcccactattgaagtgagatatgagaatattaaggtggaggcagatgttcatgtgggaagtagagctttaccttcattcattaatttctgcgttaatatactcgagatgttggtaagctttctgccaatattaaaaagcaaaaagaaacatgtgaccatacttgatgatgttagtggagccataaaaccaggaagattgacattgctgttgggacctccaaattctggcaaaaccacacttttattgactctagcaggaaagcttgcctcagaattaaagttttctggaagagtgacatataatggacatgaaatgaatgagttcattcctcaaagaacagctgcttatattagtcaacatgatgttcatattggggaaatgactgtaagagaaactctctctttttcagcaagatgccaaggagttggaactcgttatgacatgctcgctgaattgtctagaagagagaaagaagcaaatatcacaccggatccagatattgacgtctttatgaaggcagcttcagcagaaggccaagaatcaagtgtgatcacagattatattattaagattcttggcttggaaggatgtgctgatacaatggtagggaatgaaatgttgaggggtatctctggaggacaaaagaaacgtgtcacaactggggagatgctcgtcgggccagcaggggcattgttcatggatgagatttcaactggcttagatagttcaactacatttcagattgtgaactcactcaagcaatttgcccacatctttgaagaaaccattgtcatctctttactacagcctgcaccagagacttatgatctttttgatgacatcattcttttatctgatggtcagattgtgtatcagggtccacgtgaaaatgtgcttgagttcttcgaattaactggttttaaatgtccagaaaggaaggctattgctgattttcttcaagaggtaacatcaagaaaagaccaggctcaatattgggcaaggagtgaccaaccttacaagtttgtaactgtcaatgaatttgttgaagcattccagtcgtttcacattggaaagaaagtagttgaacatctttcaattccatttgacaaaaccaagagccacccagctgctttgacaacaaaaccctatggtctcaacaagatggagctcttgaaagcatgcatgtcaagagaattcttactcatgaaaagaaattccttcgtccacatcttcaagattgtgcaacttggtatattggggctgatttctgccacaatattcctgagaactaagatgcatcacaaaactttacaagatggttcaatctaccttggtgctttgttcttctccacgttgatgattatgttcaatggattgtctgaggtacctatgaccattgtcaagcttccagtgttttacaagcaaagagatcttcaattcttccctgcttgggcgtatgctcttccatcaatgatttataaggcccctgttgcttttattgaagtactagtttggatgaccattacatactacagcattgggtttgatccgtattttggaagggttgttaagctatatgttctctttgtcattattaatcagatggcctctggactgtttcgagctattgcgtcaattggtaggagcatgatcatagccaacacatttggggcattttccttgctattgcttttcgtacttggcggttttgtgttgtctagagatttcatcaaaggttggtggatttggggttactggatatcaccattgatgtacggtcagactggagttgtagttaacgagttcaatggaaacaaatggaaacatgttccaccaaactcaacagaaactcttggggttcaagttttaaaagcacgaggattctttactgactcatattggtactggcttgggtttgcggcgctgagtgcatatgttgtcattttcaactttgtgtacactttggctctcacttaccttaatccactagagcagagacaagctgtttcgaatgaaaattctgagagtggtgatatccaaaatgacgaagaaggagaagtcattgaaatgacgcaaagaccaaaaaacatgggtgaaaatcagagtaaaaaaaaaggaatgattcttccatttgaaccgcattctatttgttttgatgatgtttgttactcagtggacatgcctcaagaaatgaagggtcaaggtgtggttgaggataaattggttctgctgaagagtgttagcggtagctttaggcctggtgtcttaacagcactgatgggagttagtggagctggtaaaaccacattgatggatgtgcttgctggtagaaaaactggtggatatattgaaggcgatattcgaatttcgggttacccaaagaagcaagaaacatttgcacgaatttctggatattgcgagcaaaatgacatccactcaccttatgttactgtttatgagtccctcctatactcagcgtggcttcgtttgccgtctgaagttgatatggataccagaaagatgttcattgaggaagtgatggagcttgtggaactcgttccacttagacaagcattagttggattgcctggggtgaatggtctctcaactgagcagagaaaaaggttgacaattgcagttgagttagtggcaaacccttctataatattcatggatgaaccaacttcaggactagatgccagggctgctgctattgttatgagaacggttaggaacacagtggacactggcagaactgttgtgtgcacaattcatcaaccaagtattgacatctttgaagcctttgatgagttatttctattgaagattggaggagaagagatatacgtgggaccattaggccgccattcttgccatctaatcaactattttgaggctattgaaggtgtgagtaaaatcaaagaaggttacaatccaggaacttggatgttagaggtttcgagctcagcacaagaaatggctttgggtgttgatttcgccaacatttacaagaattcagacctatacaagagaaacaaagaactgatcaaagaattgagcactccagctcctggttctaaggatctttatttcccaactcagttctcacgatctttgtacactcaatgcattgcttgcttatggaaacaacgacagtcatactggcgaaacccgctttacactgctgttagattcatgtttaccactttcatagccttgatgtttggcacaatgttttgggacttgggatctaaaaggtccaataaacaagatctcaccaacgcattgggatccatgtacagtgctgttctgtttattggtgtccaaaattcatcatctgtacaaccagtagttggcgtagaaagaacagtattttacagagaaaaggctgcaggaatgttttcagcttttccttatacatttggacaggtggtagttgaaattccatatattatctgtcaagctgtagtttactgtttgatagtatatgcaatgatgggtttcgaatggactgctgtaaagttcttttggtatctcttcttcaccttcttttcgatgctttacttcactttctatggcatgatggctgtgggaatcactccaaataatcacgttgcttctattatttcggctgccttctactcaatatggaaccttttctctggatttatcgttcctaggactaggataccgatatggtggaggtggtactactggggttgtccaacagcgtggaccttgtacggactgttagtatcacagtatggagatgttgaagatgtgatggatgccgaaacaggtgaaactgtgaaacaatacttgaaaagctattttggatacaaacatgatttcattggagttgttgccatggtcaatgtcttctatggtttgctctttggaggcatctttgccttgtctattaaggttttaaattttcagaatagatag

SEQ ID NO: 113 - DNA, 4341 bp, Artificial sequence
  ABC+PTR Transporter nucleic acid sequence (of the 12 identified gene products)
atggaggtgggagacctttatagagctggaaacagcttgagaaatattagcttgagaagtagtacttcttcagtatggagaggcaataataataataataataataaagatgagtatttttcaaagtctagaagagaagatgatataaatgatgaagaggctcttacttgggctgcactagaaaagcttccaacttatgatcgtttaagaaaagggattttgactacttctaaaggagagacaactgaggttgatgtaattaatcttggttttaaacaaagaaaagacttgcttcaaagattggttaatgttgctgatgaagataatgaatcttttttgttgaagctcaaacaacgcatccaaacggttggaattgaccttcccactattgaagtgagatttgagaatgttaaggtggaggcagatgttcatgtgggaagtagagctttaccttcattcattaacttctgcattaatataatcgagatgttggtaagttttctgccaatactcaaaagcaaaaagaaacacgtgaccatacttgatgatgttagtggagccataaagccaggaagattgaccttgttattgggtcctccaagttctggcaaaaccacacttttattgactctagcaggaaagcttgcctctgaattaaagttttctggaagagtgacatataatggacatgaaatgaatgagttcattcctcaaagaacagctgcttatatcagtcaacatgatgttcatattggagaaatgactgtaagagaaactttgtctttttcggcaagatgtcaaggagttgggactcgctatgaaatgcttgctgaattgtctagaagagagaaagaagcaaatatcaaaccagatccagacattgatatctttatgaaggcaacgtcaacagaagggcaaaaatcaagtgtggtgacagactatgttttaaagattcttggtttggaagtatgtgctgatacagttgtaggcgatgaaatgctaaggggtatctccggaggacagaggaaacgagttacaactggggagatgctggttgggccatcaggggtattgttcatggatgagatttcaactggcttggacagttcaaccacgtatcagattgtgaactcattgaagcaatatgttcacatcttcaatggaactaatgtcatctcattactccaaccagcaccagagacttatgatctttttgatgatatcattcttctatctgatggtcacattgtgtatcagggtcctcgtgaaaatgtgcttgagttcttcgaatttacgggttttaaatgtcctgagaggaaagctattgctgactttcttcaagaggtaacatcaaagaaagaccaagctcaatactggacaagaggagatgaagcttacaggtttgtgagtgcaaaagaatttgttgaagcattcaaatcgtttcatgttggacagaaaataagagaatatctttcaacaccatttgacaagactaagagccatccagctgctttgacaacaaaaaactttggtctcaacaagatggaacttttgaaagcatgcatgtcaagagagtacttaatcatgaaaagaaattcctttgtccacatctttaagattgtccaactttcggtaatggggttgattcatgggactcttttcctaagaacaaagatgcatcacaggacattagaagatggtacaatctatcttggtagtttgttcttcgcagcattgatgataatgtttaatggaatgtcagagatacctatgaccattgccaagcttccagtgttttacaaacaaagagatcttcagttcttccctgcgtgggcctatgcagttccatcaatgttgtttaaggtcccaattgcttttctagaagtagcagtgtggatcattttgacatactatacaactggattggaaccaagtgttgtaaggatgtttaggctttattttatcttagtcattgttaatcagatggcctccggactctttcgatctattgcagccctttctaggaatatgataatagccaacacatttggggcattttccttgctattgcttttcgtacttggcggttttgtgttgtctagagatgatatcaacagtggatggatttgggcttactgggtaacccctttgatgtacggtcagactggaattcttgttaatgagtttcgtggaagcaaatggaataaggttacaccaaactcaacagaaactcttggaattcaagtgttaaaatctaaaggattctttactgattcttattggtattggcttggctttggggtgttggttgcatatactgttcttttcaacattttgtacactttggctctcaattaccttaattcaattgaaaaatcacaagctctttctaatgaagatcctgagaataatgatcatgaaatccaagttggcagagaaacaagaaccaatgaaatacaacaaacatcatcaataaataacactggtgaaaatcagagtaaaaagaaaggaatgattcttccatttgagccacattccattacttttaatgatgttatttactcagtggacatgccacaagcaatgaaaaatcaaggtgttgttgaggataaacttgttctactaaaaggggttagtggtagttttaggcctggtgtattgacagctttgatgggaatcagtggagctggtaagaccactttgatggatgtgcttgctggtagaaaaaccggtggatatatcgaaggggatattcgaatttctggttaccctaagaaacaagaaacatttgctcgaatttcgggatactgtgagcaaaacgacattcattcacctcatgttactgtttatgagtcattgctttactcagcatggcttcgtttaccaactgaagttgattcagaaaagagaaagatgttcattgaggaagtaatggagctagtggagctcactccacttagacaagcactagttggattgcctggggtcagtggtctctcaactgagcaaagaaagaggttgacaattgcggttgagttagtggcaaatccttctataatattcatggatgaaccaacttcagggctggatgccagagctgctgctattgtaatgagaacagttaggaacacagtggacactggcagaactgttgtgtgcacaattcatcaaccaagtattgacatctttgaagcctttgatgagctattccttatgaaaagaggaggagaagagatatatgtggggccattaggtagacattcttgccatttaatcaactattttgaggctattgaaggtgtgagtaaaataaaaaatggttacaatccaggaacttggatgttggaggtttcgagctcagcacaagaaatagctttgggtgttgatttcgccaacatttacaagaattcagagctatgcaagagaaacaaagatttgattaaagaattgagcagtccagctcctggttctaaggatctttatttcccaactcaattctctcgatctttgaacactcaatgcattgcttgcttatggaaacaaagacaatcatactggcgaaacccgctttacactgctgttagattcatgtttaccactttcatagctttaatctttggtacagtgttttgggacttgggatctaaaaggtcaaatatacaagatcttagcaatgcattgggatccatgtactgtgctgttttgtttatcggtatacaaaatgcatcatccgtacaaccagtagttagcgtagaaagaagtgtgttttacagagaaaaagccgcaggaatgtactctgcttttccttattcattcggacagttggtggttgagattccatacatattgtgtcaaagtgtagtttactgtctaattgtgtatgcaatgattggttttgaatggactgctataaagttcttctggttcttgttcttctcattcttttcaatgctttacttcactttctacggcatgatggctgtgggaatcactccaaataatcacattgcttccattgtttcctctgccttttactcagtatggaaccttttctcaggattcattatccctcggactaggatgccagtgtggtggaagtggtactattggggttgtccagtatcatggacattgtacggactgttagtatcacagtatggagatgtggatgacgtgattaacgccgttacaggtgaaactgtgaaacaatacttgagaagctatcttggttacaaacatgacttcattggagttgttgccgttgtcaatgtcttattcgctcttctttttggatccatctttgccttctctgttaagatcttaaattttcagaatagataa

SEQ ID NO: 114 - DNA, 4341 bp, Artificial sequence
  ABC+PTR Transporter nucleic acid sequence (of the 12 identified gene products)
atggaggtgggagacctttatagagctggaaacagcttgagaaatattagcttgagaagtagtacttcttcagtatggagaggcaataataataataataataataaagatgagtattttttaaagtctagaagagaagatgatataaatgatgaagaggctcttacttgggctgcactagaaaagcttccaacttatgatcgtttaagaaaagggattttgactacttctaaaggagagacaactgaggttgatgtaatcaatcttggttttaaacaaagaaaagacttgcttcaaagattggttaatgttgctgatgaagataatgaatcttttttgttgaagctcaaacaacgcatccaaacggttggaattgaccttcccactattgaagtgagatttgagaatgttaaggtggaggctgatgttcatgtgggaagtagagctttaccttcattcattaacttctgcattaatataatcgagatgttggtaagttttctgccaatactcaaaggcaaaaagaaacacgtgaccatacttgatgatgttagtggagccataaagccaggaagattgaccttgttattgggtcctccaagttctggcaaaaccacacttttattgactctagcaggaaagcttgcctctgaattaaagttttctggaagagtgacatataatggacatgaaatgaatgagttcattcctcaaagaacagctgcttatatcagtcaacatgatgttcatattggagaaatgactgtaagagaaactttgtctttttcggcaagatgtcaaggagttgggactcgctatgaaatgcttgctgaattgtctagaagagagaaagaagcaaatatcaaaccagatccagacattgatatcgttatgaaggcttcagcaatagaaggccaagaatcaagtgtgatcacagattatattattaagattcttggcttggaaggatgtgctgatacaatggtagggaatgaaatgttgaggggtatctctggaggacaaaagaaacgtgtcacaactggggagatgctcgtcgggccatcaggggtattgttcatggatgagatttcaactggcttggacagttcaaccacgtatcagattgtgaactcattgaagcaatatgttcacatcttcaatggaactaatgtcatctcattactccaaccagcaccagagacttatgatctttttgatgatatcattcttctatctgatggtcacattgtgtatcagggtcctcgtgaaaatgtgcttgagttctttgaatttacgggttttaaatgtcctgagaggaaagctattgctgactttcttcaagaggtaacatcaaagaaagaccaagctcaatactggacaagaggagatgaagcttacaggtttgtgagtgcaaaagaatttgttgaagcattcaaatcgtttcatgttggacagaaaataagagaatatctttcaacaccatttgacaagactaagagccatccagctgctttgacaacaaaaaactttggtctcaacaagatggaacttttgaaagcatgcatgtcaagagagtacttaatcatgaaaagaaattcctttgtccacatctttaagattgtccaactttcggtaatggggttgattcatgggactcttttcctaagaacaaagatgcatcacaggacattagaagatggtacaatctatcttggtagtttgttcttcgcagcattgatgataatgtttaatggaatgtcagagatacctatgaccattgccaagcttccagtgttttacaaacaaagagatcttcagttcttccctgcgtgggcctatgcagttccatcaatgttgtttaaggtcccaattgcttttctagaagtagcagtgtggatcattttgacatactatacaactggattggaaccaagtgttgtaaggatgtttaggctttattttatcttagtcattgttaatcagatggcctctggactctttcgatctattgcggccctttctaggaatatgatatttgccaacacttttgggtcctttgtgttgctcttacttatagtactaggcggtttcatcttgtctaaagatgatatcaacagtggatggatttgggcttactgggtaacccctttgatgtacggtcagactggaattcttgttaatgagtttcgtggaagcaaatggaataaggttacaccaaactcaacagaaactcttggaattcaagtgttaaaatctagaggattctttactgattcttattggtattggcttggctttggggtgttggttgcatatactgttcttttcaacattttgtacactttggctctcaattaccttaattcaattgaaaaatcacaagctctttctaatgaagatcctgagaataatgatcaagaaatccaagatggcagagaaacaagaaccaatgaaatacaacaaacatcatcaataaataacactggtgaaaatcagagtaaaaagaaaggaatgattcttccatttgagccacattccattacttttaatgatgttatttactcagtggacatgccacaagcaatgaagaatcaaggtgtagttgaggataaacttgttctactaaaaggggttagtggtagttttaggcctggtgtattgacagctttgatgggaatcagtggagctggtaagaccactttgatggatgtgcttgctggtagaaaaaccggtggatatatcgaaggcgatattcgaatttctggttaccctaagaaacaagaaacatttgctcgaatttcgggatactgtgagcaaaacgacattcattcacctcatgttactgtttatgagtcattgctttactcagcatggcttcgtttaccaactgaagttgattcagaaaagagaaagatgttcattgaggaagtaatggagctagtggagctcactccacttagacaagcactagttggattgcctggggtcagtggtctctcaactgagcaaagaaagaggttgacaattgcggttgagctagtggcaaatccttctataatattcatggatgaaccaacttcagggctggatgccagagctgctgctattgtaatgagaacagttaggaacacagtggacactggcagaactgttgtgtgcacaattcatcaaccaagtattgacatctttgaagcctttgatgagctattccttatgaaaagaggaggagaagggatatatgtggggccattaggtagacattcttgccatttaatcaactattttgaggctattgaaggtgtgagtaaaataaaaaatggttacaatccaggaacttggatgttggaggtttcgagctcagcacaagaaatagctttgggtgttgatttcgccaacatttacaagaattcagagctatgcaagagaaacaaagaattgattaaagaattgagcagtccagctcctggttctaaggatctttatttcccaactcaattctctcgatctttgaacactcaatgcattgcttgcttatggaaacaacgacagtcatactggagaaacccgctttacaccgctgttagattcatgtttaccactttcatagccttgatctttggtacagtgttttgggacttgggatctaaaaggtcaaatatacaagatcttagcaatgcattgggatccatgtactgtgctgttttgtttatcggtatacaaaatgcatcatccgtacaaccagtagttagcgtagaaagaagtgtgttttacagagaaaaagccgcaggaatgtactctgcttttccttattcattcggacagatggtggttgagattccatacattttgtgtcaaagtgtagtttactgtctaattgtgtatgcaatgattggttttgaatggactgctataaagttcttctggttcttgttcttctcattcttttcaatgctttacttcactttctacggcatgatggctgtgggaatcactccaaataatcacattgcttccattatttcctctgccttttactcagtatggaaccttttctcaggattcattatccctcggacaaggatgccagtatggtggaagtggtactattggggttgtccagtatcatggacattgtacggactgttagtatcccagtatggagatgtggatgacgtgattaacgccgttacaggtgaaactgtgaaacaatacttgagaagctatcttggttacaaacatgatttcattggagttgttgccgttgtcaatgtcttattcgctcttctttttggatccatctttgccttctctgttaagatcttaaattttcagaatagataa

SEQ ID NO: 115 - DNA, 4314 bp, Artificial sequence
  T-AG2575-1 synt. nucleic acid sequence
atggaggtgggagatctgtataaagctggaaacagcttgagaagtagtaagggttcatcagtgtggagaggcaataataataataataataaagatgagtttttctcaaagtctagaagagaagatgatatagatgatgaagaagctcttacttgggctgcactagaaaagcttccaacttatgatcgtttaagaaaagggattttgactacttctaaaggaaagccaacagaggttgatgtaatcaatcttggttctaaagaaagaaaagatttgcttcgtagattggttaatgttgctgacgaagataatgaatcttttttgttgaagctcaaacaacgcatccaaacggttggaattgaccttcccactattgaagtgagatatgagaatattaaggtggaggcagatgttcatgtgggaagtagagctttaccttcattcattaacttctgcgttaatatactcgagatgttggtaagctttctgccaatattaaaaagcaaaaagaaacatgtgaccatacttgatgatgttagtggagccataaaaccaggaagattgacattgctgttgggacctccaaattctggcaaaaccacacttttattgactctagcaggaaagcttgcctcagaattaaagttttctggaagagtgacatataatggacatgaaatgaatgagttcattcctcaaagaacagctgcttatattagtcaacatgatgttcatattggggaaatgactgtaagagaaactctctctttttcagcaagatgccaaggagttggaactcgttatgacatgctcgctgaattgtctagaagagagaaagaagcaaatatcacaccggatccagatattgacgtctttatgaaggcagcttcagcagaaggccaagaatcaagtgtgatcacagattatattattaagattcttggcttggaaggatgtgctgatacaatggtagggaatgaaatgttgaggggtatctctggaggacaaaagaaacgtgtcacaactggggagatgctcgtcgggccagcaggggcattgttcatggatgagatttcaactggcttagatagttcaactacatttcagattgtgaactcactcaagcaatttgcccacatctttgaagaaaccattgtcatctctttactacagcctgcaccagagacttatgatctttttgatgacatcattcttttatctgatggtcagattgtgtatcagggtccacgtgaaaatgtgcttgagttcttcgaattaactggttttaaatgtccagaaaggaaggctattgctgattttcttcaagaggtaacatcaagaaaagaccaggctcaatattgggcaaggagtgaccaaccttacaagtttgtaactgtcaatgaatttgttgaagcattccagtcgtttcacgttggaaagaaagtagttgaacatctttcaattccatttgacaaaaccaagagccacccagctgctttgacaacaaaaccctatggactcaacaagatggagctcttgaaagcatgcatgtcaagagagttcctactcatgaaaagaaattccttcgtccacatcttcaagattgtgcaacttggtatattggggctgatttctgccacaatattcctgagaactaagatgcatcacaaaactttacaagatggttcaatctaccttggtgctttgttcttctccacgttgatgattatgttcaatggattgtctgaggtacctatgaccattgtcaagcttccagtgttttacaagcaaagagatcttcaattcttccctgcttgggcgtatgctcttccatcaatgatttataaggcccctgttgcttttattgaagtcctagtttggatgaccattacatactacagcattgggtttgatccgtattttggaagggttgttaagctatatgttctctttgtcattattaatcagatggcctctggactgtttcgagctattgcgtcaattggtaggagcatgatcatagccaacacatttggggcatttgccttgctattgcttttcgtacttggcggttttgtgttgtctagagatttcatcaaaggttggtggatttggggttactggatatcaccattgatgtacggtcagactggagttgtagttaacgagttcaatggaaacaaatggaaacatgttccaccaaactcaacagaaactcttggggttcaagttttaaaagcacgaggattctttactgactcatattggtactggcttgggtttgcggcgctgagtgcatatgttgtcattttcaactttgtgtacactttggctctcacttaccttaatccactagagcagagacaagctgtttcgaatgaaaattctgagagtggtgatatccaaaatgacgaagaaggagaagtcattgaaatgacgcaaagaccaaaaaacatgggtgaaaatcagagtaaaaaaaaaggaatgattcttccatttgaaccgcattctatttgttttgatgatgtttgttactcagtggacatgcctcaagaaatgaagggtcaaggtgtggttgaggataaattggttctgctgaagagtgttagcggtagctttaggcctggtgtcttaacagcactgatgggagttagtggagctggtaaaaccacattgatggatgtgcttgctggtagaaaaactggtggatatattgaaggcgatattcgaatttcgggttacccaaagaagcaagaaacatttgcacgaatttctggatattgcgagcaaaatgacatccactcaccttatgttactgtttatgagtccctcctatactcagcgtggcttcgtctcccgtctgaagttgatatggataccagaaagatgttcattgaggaagtgatggagcttgtggaactcgttccacttagacaagcattagttggattgcctggggtgaatggactctcaactgagcagagaaaaaggttgacaattgcagttgagttagtggcaaacccttctataatattcatggatgaaccaacttcaggactagatgccagggctgctgctattgttatgagaacggttaggaacacagtggacactggcagaactgttgtgtgcacaattcatcaaccaagtattgacatctttgaagcctttgatgagttatttctattgaagattggaggagaagagatatatgtgggaccattaggccgccattcttgccatctaatcaactattttgaggctattgaaggtgtgagtaaaatcaaagaaggttacaatccaggaacttggatgttagaggtttcgagctcagcacaagaaatggctttgggtgttgatttcgccaacatttacaagaactcagacctatacaagagaaacaaagaactgatcaaagaattgagcactccagctcctggttctaaggatctttatttcccaactcaattctcacgatctttgaacactcaatgcattgcttgcttatggaaacaacgacagtcatactggcgaaacccgctttacactgctgttagattcatgtttaccactttcatagccttgatgtttggcacaatgttttgggacttgggatctaaaaggtccaataaacaagatctcaccaacgcattgggatccatgtacagtgctgttctgtttattggtgtccaaaattcatcatctgtacaaccagtagttggcgtagaaagaacagtattttacagagaaaaggctgcaggaatgttttcagcttttccctatacatttggacaggtggtagttgaaattccatatattatctgtcaagctgtagtttactgtttgatagtatatgcaatgatgggtttcgaatggactgctgtaaagttcttttggtatctcttcttcaccttcttttcgatgctttacttcactttctatggcatgatggctgtgggaatcactccaaataatcacgttgcttctattatttcggctgccttctactcaatatggaaccttttctctggatttatcgttcctaggactaggataccgatatggtggaggtggtactactgggcttgtccaacagcgtggaccttgtacggactgttagtatcacagtatggagatgttgaagatgtgatggatgccgaaacaggtgaaactgtgaaacaatacttgaaaagctattttggatacaaacatgatttcattggagtcgttgccatggtcaatgtgttctatggtttgctctttggaggcatctttgccttgtctattaaggttttaaattttcagaatagatag

SEQ ID NO: 116 - protein, 1437 aa, Artificial sequence
  T-AG2575-1 synt. amino acid sequence
MEVGDLYKAGNSLRSSKGSSVWRGNNNNNNKDEFFSKSRREDDIDDEEALTWAALEKLPTYDRLRKGILTTSKGKPTEVDVINLGSKERKDLLRRLVNVADEDNESFLLKLKQRIQTVGIDLPTIEVRYENIKVEADVHVGSRALPSFINFCVNILEMLVSFLPILKSKKKHVTILDDVSGAIKPGRLTLLLGPPNSGKTTLLLTLAGKLASELKFSGRVTYNGHEMNEFIPQRTAAYISQHDVHIGEMTVRETLSFSARCQGVGTRYDMLAELSRREKEANITPDPDIDVFMKAASAEGQESSVITDYIIKILGLEGCADTMVGNEMLRGISGGQKKRVTTGEMLVGPAGALFMDEISTGLDSSTTFQIVNSLKQFAHIFEETIVISLLQPAPETYDLFDDIILLSDGQIVYQGPRENVLEFFELTGFKCPERKAIADFLQEVTSRKDQAQYWARSDQPYKFVTVNEFVEAFQSFHVGKKVVEHLSIPFDKTKSHPAALTTKPYGLNKMELLKACMSREFLLMKRNSFVHIFKIVQLGILGLISATIFLRTKMHHKTLQDGSIYLGALFFSTLMIMFNGLSEVPMTIVKLPVFYKQRDLQFFPAWAYALPSMIYKAPVAFIEVLVWMTITYYSIGFDPYFGRVVKLYVLFVIINQMASGLFRAIASIGRSMIIANTFGAFALLLLFVLGGFVLSRDFIKGWWIWGYWISPLMYGQTGVVVNEFNGNKWKHVPPNSTETLGVQVLKARGFFTDSYWYWLGFAALSAYVVIFNFVYTLALTYLNPLEQRQAVSNENSESGDIQNDEEGEVIEMTQRPKNMGENQSKKKGMILPFEPHSICFDDVCYSVDMPQEMKGQGVVEDKLVLLKSVSGSFRPGVLTALMGVSGAGKTTLMDVLAGRKTGGYIEGDIRISGYPKKQETFARISGYCEQNDIHSPYVTVYESLLYSAWLRLPSEVDMDTRKMFIEEVMELVELVPLRQALVGLPGVNGLSTEQRKRLTIAVELVANPSIIFMDEPTSGLDARAAAIVMRTVRNTVDTGRTVVCTIHQPSIDIFEAFDELFLLKIGGEEIYVGPLGRHSCHLINYFEAIEGVSKIKEGYNPGTWMLEVSSSAQEMALGVDFANIYKNSDLYKRNKELIKELSTPAPGSKDLYFPTQFSRSLNTQCIACLWKQRQSYWRNPLYTAVRFMFTTFIALMFGTMFWDLGSKRSNKQDLTNALGSMYSAVLFIGVQNSSSVQPVVGVERTVFYREKAAGMFSAFPYTFGQVVVEIPYIICQAVVYCLIVYAMMGFEWTAVKFFWYLFFTFFSMLYFTFYGMMAVGITPNNHVASIISAAFYSIWNLFSGFIVPRTRIPIWWRWYYWACPTAWTLYGLLVSQYGDVEDVMDAETGETVKQYLKSYFGYKHDFIGVVAMVNVFYGLLFGGIFALSIKVLNFQNR

SEQ ID NO: 117 - DNA, 3774 bp, Artificial sequence
  T_790_1 synt. nucleic acid sequence
atggataacaagaccaacaaacatcgcggcggtaacggcgacggtgacgataatgaagatcaagatcaagaagatactaaaaagaacaacaacaacaataacagcaacaaagtttcgttgcttaaactgtttagtttcgcagatttttacgattatgttttgatgggcattggtacaattggagccataattcatggagcttcggttcccattttctttatcttctttggaaaattaataaacgttattggaatggcttatctttttcccaaagaagcttcacacaaagttgccaagtattcgttggattttgtatatctaagtatagctatattgttttcatcatggacagaggtagcttgctggatgcatactggcgaaagacaagccgctaagatgagaatggcctatttgagagcaatgttaagtcaagatattagtctttttgatactgaagcttctactggtgaagttatttctgctattacaagtgatattattgttgttcaagatgcactttctgaaaaggtgggtaatttcttgcattacataagccgatttgtggtgggattcatagttgggtttgcaagggtttggcagataagtttggtgactctgtctatagtcccattaattgcattggctggaggtgtctacgcttatattgctaccggtcttattgctagggttcgaaaatcttatgtcaaggctggtgagatcgccgaagaggtaataggaaatgtgagaacggtgcaagcatttgcaggggaagaaaaggcagtgaaaatgtacacgtcagcacttgcccacacatacatgtacggacgaaaagcagggttggctaagggtttgggtttggggttcatgcattgcacccttttcctctcttggtctttgcttgtgtggtacgttagcattgttgtccataagagcatagccaatggcggcgagtctttcactaccatgctcaatgtcgtcatcgctggcctgtcattaggacaggcagctctagacatttctgcatttgttcgagctaaggcagcagcatatcccatattcgcgatgatagagaggaacactgcaagcaagtctagtgccatgagtggccgaaagttaggaaaactcgagggacacatccaattcaacaatgtgacatttagttatccatcaaggcctgatgtaacaatcttcaacaagttgtctcttgacattccttcggggaagattgttgctcttgtcgggggaagtggttcgggcaaaagcacagtcatttccctaatcgaacgcttctatgaacctctttcgggtgagatactattggatgggaacaatattaaagagcttgatctcaagtggatgaggcaacaaattggacttgttaatcaagagcctgcactctttgcaactagcattagggagaatattctttatgggaaagatgaggcttcacttgatgagatcactcgtgctgctaaactttctgaggctatttctttcattaacaacctccctgaaagatttgaaactcaggttggtgagagaggtatacaactctctggtggacaaaagcaaagaattgccatatcaagagccatagttaagaatccgtcaattcttttacttgatgaagctacaagtgccttagatgcagagtcagagaagagtgttcaagaggcacttgaccgtgtcatggtaggacgaacaaccatcgtagttgctcatcgtctctccaccattagaaatgcagacataatagctgttgttcaagagggaaagatagttgaaacaggttgccatgatgaactcatttccaatccaaatagtgtctattcatcacttgttcaactccaagaagccgcgcctttgcagcgcaattctagcttaggacgcccaccgagcattaagttctcgagggaattatcgcgcacaacaaccagttttggtgctagttttcggtctgataaagattctattagccgagttggtgctgatggaggagcagttgagcctgtaaagacaacaaatgtttcagctaaaagactgtattccatgattggaccagattggctttatggattgtgtggtactatctgcgcttttattgctggtgctcaaatgcctctgtttgctcttggtatttcacatgctcttgtgtcatattacatggactgggatacaacaaaacatgaggtcaaaaagatatccatacttttctgttgtggggctgttgtaactgtcattgttcatggaattgagcatctttgtttcggtaccatgggagagcgccttactcttcgtgtgagggaaagaatgttttcggccatgttgaggaatgagatagcatggtttgatgacacaaacaacacgagctcaatgctctcgtcgcgattagaaagcgatgcaactctgttacgaacaatcgttgttgatcgctccacaattctgttacaaaatgttggtttggttgtggcctcattcatcatagctttcctcttgaattggaggatcacacttgttgtcttggcaacttatcctttggtcattagtgggcacatcagtgaaaaactcttcatgcagggctatggtggcaacttgagcaaagcatatctaaaagccaacatgttggcaggtgaagctgtgagcaatatcagaactgttgctgcattttgtgctgagcaaaaggtgcttgacctttatgctcgcgagcttgttgaaccgtccaagcgctcgttcactcgtggccagattgctggaatcttttatgggatttcacagtttttcatcttctcatcatatggacttgcgttatggtatggctctgttttgatgggaaaagagctgagtagctttaaatctgtgatgaaatcattcatggttttgatagttactgcattagcaatgggagagacattggcattggctcctgatcttttgaaagggaatcaaatggttgcgtctgtgttcgaggtgttggaccgaaaaacagaagtaagcggggattcgggtgaagaattagcatcagttgatggtacaattgagctaagggacatccattttagctacccttcgaggcctgatgttgttatatttaaggactttaatctaaaagttcgttcagggaagagtatggctttagtgggacaaagtggatcaggaaaaagctcagtaatttcaatcattctcaggttctatgatcctacatcagggaaggttcttattgatgggaaagacatgaagaaactaaagctaaaatcacttagaaaacacattggtttagtgcaacaagagccagcactttttgctacatcaatctatgaaaacatcctatatggaaaagaaggagcatccgaatcagaagtgatcgaagcggccaaactagccaatgctcacagtttcataagcgccttacccgaaggctactcaacaaaagtaggcgaaagaggtgttcaactctcaggaggccaaagacaaagagtagccattgcaagagctgtactaaaaaaccccgaaatccttttactcgacgaagcaacaagcgcgcttgatgttgaatctgaacgagttgttcaacaagctctagacagattaatgaagaacaggacaacaatcatggttgctcataggttgtctacaatcaaaaatgctgaccaaatttctgtcattcaagatgggaaaatcattgagcaaggaactcattcaactcttatagataacacaaatggaccttattataagttgataaacattcaacaacaacaacagcagcaactatag

SEQ ID NO: 118 - protein, 1257 aa, Artificial sequence
  T_790_1 synt. amino acid sequence
MDNKTNKHRGGNGDGDDNEDQDQEDTKKNNNNNNSNKVSLLKLFSFADFYDYVLMGIGTIGAIIHGASVPIFFIFFGKLINVIGMAYLFPKEASHKVAKYSLDFVYLSIAILFSSWTEVACWMHTGERQAAKMRMAYLRAMLSQDISLFDTEASTGEVISAITSDIIVVQDALSEKVGNFLHYISRFVVGFIVGFARVWQISLVTLSIVPLIALAGGVYAYIATGLIARVRKSYVKAGEIAEEVIGNVRTVQAFAGEEKAVKMYTSALAHTYMYGRKAGLAKGLGLGFMHCTLFLSWSLLVWYVSIVVHKSIANGGESFTTMLNVVIAGLSLGQAALDISAFVRAKAAAYPIFAMIERNTASKSSAMSGRKLGKLEGHIQFNNVTFSYPSRPDVTIFNKLSLDIPSGKIVALVGGSGSGKSTVISLIERFYEPLSGEILLDGNNIKELDLKWMRQQIGLVNQEPALFATSIRENILYGKDEASLDEITRAAKLSEAISFINNLPERFETQVGERGIQLSGGQKQRIAISRAIVKNPSILLLDEATSALDAESEKSVQEALDRVMVGRTTIVVAHRLSTIRNADIIAVVQEGKIVETGCHDELISNPNSVYSSLVQLQEAAPLQRNSSLGRPPSIKFSRELSRTTTSFGASFRSDKDSISRVGADGGAVEPVKTTNVSAKRLYSMIGPDWLYGLCGTICAFIAGAQMPLFALGISHALVSYYMDWDTTKHEVKKISILFCCGAVVTVIVHGIEHLCFGTMGERLTLRVRERMFSAMLRNEIAWFDDTNNTSSMLSSRLESDATLLRTIVVDRSTILLQNVGLVVASFIIAFLLNWRITLVVLATYPLVISGHISEKLFMQGYGGNLSKAYLKANMLAGEAVSNIRTVAAFCAEQKVLDLYARELVEPSKRSFTRGQIAGIFYGISQFFIFSSYGLALWYGSVLMGKELSSFKSVMKSFMVLIVTALAMGETLALAPDLLKGNQMVASVFEVLDRKTEVSGDSGEELASVDGTIELRDIHFSYPSRPDVVIFKDFNLKVRSGKSMALVGQSGSGKSSVISIILRFYDPTSGKVLIDGKDMKKLKLKSLRKHIGLVQQEPALFATSIYENILYGKEGASESEVIEAAKLANAHSFISALPEGYSTKVGERGVQLSGGQRQRVAIARAVLKNPEILLLDEATSALDVESERVVQQALDRLMKNRTTIMVAHRLSTIKNADQISVIQDGKIIEQGTHSTLIDNTNGPYYKLINIQQQQQQQL

SEQ ID NO: 119 - DNA, 2175 bp, Artificial sequence
  T_792_1 synt. nucleic acid sequence
atggcttctgttactccctcaactactattgaccaagaccattatcataacaaaaaagttaccatttcacgaactaccagtactacaagtagtaataataatactaatcatggaaaccctagaataacagtggtagagattgaaacagctaataatcgcaatgcgagttatcgtagttcgattttcggggctgatcatgaagttagtttgccagtagtggaagatcatcagggagttttcttgacatggcaggatttgtgggtgacagtttctagcggaaagaacagtaacagaccaattcttcggggtctgactggctatgctaagccaggggagctgttggctataatgggaccgtctggttgtggaaaatctactctccttgatgcattggcaggcagattgaatgcaaacacaagacaaagtggggatatattgataaatggaaataaacagactctagcatatggaacatcggcatacgtaacacaagaggatactcttttaacgaccttaacggtaagagaagccgtacactactcagcacagttgcaacttccggactccatgtcctcagcggagaagaaggaaagagctgagatgactataagagagatgggtttaactgacgctgttaacactcgcatcggtggtagtgggttaggaactgggagcaaaggcctaagcggcggacagaagaggagagtgagcatctgcatagagattctcactcgtccgaagctacttttccttgatgagcccacgagtgggctcgacagtgctgcttcatactatgtgatgagcagcattgcgtcgttggatattcagagtcggaggggtggtggggccggtggccggaggactgtggtggcttccatccaccagcccagttccgaagtgtttcagctttttaatactctttgccttctttctgctggtaaaattgtgtattttggtcctgctagtgcagctaatgagttttttactatgagtggctttccttgtccatctctccaaaatccatctgatcatttcctaaaaacaataaacaaggattttgataaagtgcagaaggatcttgagcaaggtttaccaattagaggacgacctacagttgaagaagcaattgaaactcttgtaaagtcttataaagcatctgaaaattgccagctagttcaacaacaagtatcccaaatatgtaataaaaagaataagagcgtaggcttaatggagaagaagagaagccacgctggtttcataagccaatgtggtgtgttaacaagaagatcattcaaaaacatgtacagagatttgggttactactggtttcgtctagttatatatattggcttggctattggattgggcactatcttttgcaacattggccattctgacggatccgttgaggcaagagcttcacttatcatgtatgttgcttctttcttaactttcatgactattggaggattcccatcttttgttgaggacatgaaggtatttggaagagaaagactaaatggacactatagtgtaacatcatttgtaatgggtaacaccatatctgcacaaccatacctcgtccttatcgctctgataccaggtgctttagcttactttccgccaggactccgaggaggattcgaacacttcatttactttgtgttggttctctatgcttgcatgatgttggtcgagagcctaatgatgatagtggcagctctcgtccctaactttctcttggggatcatcacgggggctggaatccaagggtttatgatgttggcaggtggattttttcgcctcccaaatgaccttccagatcctttctggaggtaccctgtgttttatatttcgtttcatagatatgcatttcaaggattatataagaatgagttcaagggtttgatgttcgtggacgaaattcttggtaagtcacacaagattagtggggatgaaatcttgagaaataagtaccaagttaatatgagctattcgaagtgggttgattttgttttattgttgtcaatggtgtttgcttatcgtgttatgttcttgctcatcctcaaaatttctgagaattataagactatttctgctgcttttgcttttggacgacgcaagcctagtacacaagtcatggagaatcctactgccactccacctcatgcatag

SEQ ID NO: 120 - protein, 724 aa, Artificial sequence
  T_792_1 synt. amino acid sequence
MASVTPSTTIDQDHYHNKKVTISRTTSTTSSNNNTNHGNPRITVVEIETANNRNASYRSSIFGADHEVSLPVVEDHQGVFLTWQDLWVTVSSGKNSNRPILRGLTGYAKPGELLAIMGPSGCGKSTLLDALAGRLNANTRQSGDILINGNKQTLAYGTSAYVTQEDTLLTTLTVREAVHYSAQLQLPDSMSSAEKKERAEMTIREMGLTDAVNTRIGGSGLGTGSKGLSGGQKRRVSICIEILTRPKLLFLDEPTSGLDSAASYYVMSSIASLDIQSRRGGGAGGRRTVVASIHQPSSEVFQLFNTLCLLSAGKIVYFGPASAANEFFTMSGFPCPSLQNPSDHFLKTINKDFDKVQKDLEQGLPIRGRPTVEEAIETLVKSYKASENCQLVQQQVSQICNKKNKSVGLMEKKRSHAGFISQCGVLTRRSFKNMYRDLGYYWFRLVIYIGLAIGLGTIFCNIGHSDGSVEARASLIMYVASFLTFMTIGGFPSFVEDMKVFGRERLNGHYSVTSFVMGNTISAQPYLVLIALIPGALAYFPPGLRGGFEHFIYFVLVLYACMMLVESLMMIVAALVPNFLLGIITGAGIQGFMMLAGGFFRLPNDLPDPFWRYPVFYISFHRYAFQGLYKNEFKGLMFVDEILGKSHKISGDEILRNKYQVNMSYSKWVDFVLLLSMVFAYRVMFLLILKISENYKTISAAFAFGRRKPSTQVMENPTATPPHA

SEQ ID NO: 121 - DNA, 4290 bp, Artificial sequence
  T_795_1 synt. nucleic acid sequence
atggagagtaatgatatatacagaggcagcaacagtatgagaagtggtagcagttctttatggaggaacaacaacatggaagttttctctaaatcctcaagggatgaggacgatgaagatgctctcaaatgggctgctcttgaaaagcttccaacttactctcgtttgagaaaaggcattttcactacctccaaaggtgaatccaatgaagttgatatacataatcttggctttcaacaaaggaaggatttgcttgagagacttgttaaggttgctgaggaagataatgaaaggtttttgttgaagctcaaaaatcgtatcgacagggttggacttgatgttccaactattgaagtgagatttgagcatgttaatgtggaggcagatgttcatgttggaagcagggctttgccttcattcattaacttctccattaatatcttcgagagtgtactgggatttctgcctattttcaatactaaaaagaaacatcttaatatccttcaagatgttagcggagttataaagccaggaaggttaacattgctattgggtcctccaagttctggcaagacaacacttttattgactctggcaggaaagcttgccaaggatttaaagttttctgggagggtgacttataatggacatgagatgaatgagtttgtacctgtaagaacagctgcctatattagtcaacatgatgtccatattggagaaatgactgtaagagaaactttatctttctctgcaagatgccaaggagttggaactcgtttcgacatgctagctgaattggctagaagagagaaagaagcaaatatcaaacctgatgcagatattgatgtctacatgaaggcagtggcgacagaaggacaagagacaaatgtcgtgacagattatgttcttaagattcttggtttggaagtatgtgctgatataatggtaggggatgaaatgctaaggggtatttctggaggacagaggaagcgtgtcacaacaggggagatgcttgttggaccagctggtgtattgttaatggacgagatttcaactggtttggacagttcaactacgtttcagattgtgaactcactcaagcaatatgttcacatctttaatggaactaatgtcatctctttactccagccagcaccagagacttatgatctttttgatgatattattcttctatctgatggtcagattgtgtatcaaggtccacgagaaaatgtgctttcattctttgaagccatggggttcaaatgtcctgaaagaaaaggtgtagcagactttcttcaagaggtaacatcaaggaaagatcaagctcaatattgggcaagaaaagatcagccttataggtatgtgaaagtcaaggattttgctgaggcattcaaatcattccatgtggggcagacaataggagatcatctttcaactccatacgacaagagcaagaatcatcctgctgctttgacaaccaaaaactatggtgtaaagaagaaagagttcctgaaagcttgtttctcaagagaatatttgctcatgaagagaaactcatttgtctacatcttcaagattgtacaacttgtgttcatggcgctgattgctacaacacttttcttgagaactgagatgaaacgtaatactgtagatgatggtggaatttaccttggtgctttgttcttcactgtaataatgattatgttcaatggaatgtcagagattccaatgaccattgctaagcttccagtgttttacaagcaaagggacctgcagttctatccagcttgggcatatgctcttccatcttggattctcaagatcccaataactttggtagaagtagcagtatgggtggccattacatactattcaatgggactagatccaaatgttggaaggttgtttcggcaatatgtggctctgatatttgctaatcagatgtcctcagcattattccgagctactgcagctactggtaggaacatgatcgtagccaacacatttggtacatttgtgcttgttatgcttataactttgggtggtttcgttctctctaaagatgacataaagggctggtggatttggggttactggacgtcacctctaatgtatggtcaaactgctgttcttgttaacgagtttcttggagaaaactggagacatgtaggaccaaactcaacaaaacctcttggtattcaagtcttggaatcaagagggttctttactagaggatattggtactggcttggtttgggagcaatgacaggattcattattatactaaacattttatacacagtggctctcacttaccttaaccgttttgagaaagcacaatctgtcaaatctgaagatcctgaaaacgatatccaagatgataacagggccactgaaatgcagcaacgatcaaataatagtccgaacattggtgaaaatcaaattgcaaagaaaggaatgattctgccatttgagccacattccatttcttttgacgatgttatttactcagtggatatgccacaggaaatgaaaactcaaggtgtgggtgaggataaacttgttctactaaaaggcgttagtggtagttttaggcctggtgtgttgacagcactgatgggagttagtggagctggtaagaccactttgatggatgtgcttgctggtagaaaaactggtggatacattgagggtgatgttagaatctctggttaccctaagaagcaagagacgtttgcccgaatttctggatattgtgagcaaaatgacatccattcacctcatgttacaatttatgagtcattgctttactcagcatggcttcgtttaccagctgaagttgactctaaaaagagagagatgttcattgaggaagtgatggagcttgttgaactcgctccacttagacaagcacttgttggattgcctggggtgaatggactctcaactgagcaaagaaaaagactaaccattgcagttgagttagtggcaaacccttctataatattcatggatgaaccaacttcagggctagatgccagggctgctgctattgttatgagaacagttaggaacacagtggatactggcagaacagttgtgtgcacaattcatcaaccaagtattgatatctttgaagcctttgatgagctattccttatgaaaagaggaggagaagagatatatgtggggccattaggtcgacattcttgccatcttatcagctattttgaggcaattgaaggtgtcagcaaagtcaaagatggttataatcctgcaacttggatgttagaggtttcgagttccgcccaagaacttgctttgggagttgatttcaacaaaatttacaagagctcggaactatataggagtaacaaacagcttattaaagagttgagcatccctgctcctggttcaaaggatcttcacttcgctactcaatactctcgctcatctttcactcaatgcattgcttgcttatggaaacaacgtcggtcttactggcgaaacccgccttatactgctgtgagatttatgtttaccactttcatagccttgatgtttggaacaatattctgggacttaggatctaaaaggacaagacaacaagatatcattaattcaatgggatcaatgtatagtgcagtgttcttcatagggatgcaaaatgctgcatctgtacagccagtagtttccattgaaagaacagtcttttacagagaaagagctgcaggaatgtactcagcttttccctacacatttggacaggtggtagtggagattccatacattttctttcaagctgcagtatattgcctaatagtatacgcaatgatcggatacgaatggactgcagcaaagttcttttggtatctgttttacaccttctttgctatgctctacttcactttttatggcatgatgtgtgtgggagtcactcctaaccatcacattgcttccatcgtttcttctgccttctatggattatggaacatcttcgctggctttatcgtccctcgaaccaggataccaatatggtggaggtggtactattgggcttgtccagttgcatggactctatacggattggtgacatcacaatatggagatttacacgaatacatcattattgagacaggcgagactttaccgcagtttctgaggcgattttttggatatagacatgatttcttggaagttgttgcagtcgtcaatgtcgcctttacattgatcttcgcaatcagctttgcatttgctatcaagaccttcaatttccaaaaccgatag

SEQ ID NO: 122 - protein, 1429 aa, Artificial sequence
  T_795_1 synt.  amino acid sequence
MESNDIYRGSNSMRSGSSSLWRNNNMEVFSKSSRDEDDEDALKWAALEKLPTYSRLRKGIFTTSKGESNEVDIHNLGFQQRKDLLERLVKVAEEDNERFLLKLKNRIDRVGLDVPTIEVRFEHVNVEADVHVGSRALPSFINFSINIFESVLGFLPIFNTKKKHLNILQDVSGVIKPGRLTLLLGPPSSGKTTLLLTLAGKLAKDLKFSGRVTYNGHEMNEFVPVRTAAYISQHDVHIGEMTVRETLSFSARCQGVGTRFDMLAELARREKEANIKPDADIDVYMKAVATEGQETNVVTDYVLKILGLEVCADIMVGDEMLRGISGGQRKRVTTGEMLVGPAGVLLMDEISTGLDSSTTFQIVNSLKQYVHIFNGTNVISLLQPAPETYDLFDDIILLSDGQIVYQGPRENVLSFFEAMGFKCPERKGVADFLQEVTSRKDQAQYWARKDQPYRYVKVKDFAEAFKSFHVGQTIGDHLSTPYDKSKNHPAALTTKNYGVKKKEFLKACFSREYLLMKRNSFVYIFKIVQLVFMALIATTLFLRTEMKRNTVDDGGIYLGALFFTVIMIMFNGMSEIPMTIAKLPVFYKQRDLQFYPAWAYALPSWILKIPITLVEVAVWVAITYYSMGLDPNVGRLFRQYVALIFANQMSSALFRATAATGRNMIVANTFGTFVLVMLITLGGFVLSKDDIKGWWIWGYWTSPLMYGQTAVLVNEFLGENWRHVGPNSTKPLGIQVLESRGFFTRGYWYWLGLGAMTGFIIILNILYTVALTYLNRFEKAQSVKSEDPENDIQDDNRATEMQQRSNNSPNIGENQIAKKGMILPFEPHSISFDDVIYSVDMPQEMKTQGVGEDKLVLLKGVSGSFRPGVLTALMGVSGAGKTTLMDVLAGRKTGGYIEGDVRISGYPKKQETFARISGYCEQNDIHSPHVTIYESLLYSAWLRLPAEVDSKKREMFIEEVMELVELAPLRQALVGLPGVNGLSTEQRKRLTIAVELVANPSIIFMDEPTSGLDARAAAIVMRTVRNTVDTGRTVVCTIHQPSIDIFEAFDELFLMKRGGEEIYVGPLGRHSCHLISYFEAIEGVSKVKDGYNPATWMLEVSSSAQELALGVDFNKIYKSSELYRSNKQLIKELSIPAPGSKDLHFATQYSRSSFTQCIACLWKQRRSYWRNPPYTAVRFMFTTFIALMFGTIFWDLGSKRTRQQDIINSMGSMYSAVFFIGMQNAASVQPVVSIERTVFYRERAAGMYSAFPYTFGQVVVEIPYIFFQAAVYCLIVYAMIGYEWTAAKFFWYLFYTFFAMLYFTFYGMMCVGVTPNHHIASIVSSAFYGLWNIFAGFIVPRTRIPIWWRWYYWACPVAWTLYGLVTSQYGDLHEYIIIETGETLPQFLRRFFGYRHDFLEVVAVVNVAFTLIFAISFAFAIKTFNFQNR

SEQ ID NO: 123 - DNA, 4341 bp, Artificial sequence
  T-AG2575-2  synt. nucleic acid sequence
atggaggtgggtgacctttatagagctggaaacagcttgagaaatattagcttgagaagtagtacttcttcagtatggagaggcaataataataataataataataaagatgagtattttttaaagtctagaagagaagatgatataaatgatgaagaggctcttacttgggctgcactagaaaagcttccaacttatgatcgtttaagaaaagggattttgactacttctaaaggagagacaactgaggttgatgtaatcaatcttggttttaaacaaagaaaagacttgcttcaaagattggttaatgttgctgatgaagataatgaatcttttttgttgaagctcaaacaacgcatccaaacggttggaattgaccttcccactattgaagtgagatttgagaatgttaaggtggaggctgatgttcatgtgggaagtagagctttaccttcattcattaacttctgcattaatataatcgagatgttggtaagttttctgccaatactcaaaagcaaaaagaaacacgtgaccatacttgatgatgttagtggagccataaagccaggaaggttgaccttgttattgggtcctccaagttctggcaaaaccacacttttattgactctagcaggaaagcttgcctctgaattaaagttttctggaagagtgacatataatggacatgaaatgaatgagttcattcctcaaagaacagctgcttatatcagtcaacatgatgttcatattggagaaatgactgtaagagaaactttgtctttttcggcaagatgtcaaggagttgggactcgctatgaaatgcttgctgaattgtctagaagagagaaagaagcaaatatcaaaccggatccagatattgacgtctttatgaaggcagcttcagcagaaggccaagaatcaagtgtgatcacagattatattattaagattcttggcttggaaggatgtgctgatacaatggtagggaatgaaatgttgaggggtatctctggaggacaaaagaaacgtgtcacaactggggagatgctcgtcgggccagcaggggcattgttcatggatgagatttcaactggcttggacagttcaaccacgtatcagattgtgaactcattgaagcaatatgttcacatcttcaatggaactaatgtcatctcattactccaaccagcaccagagacttatgatctttttgatgatatcattcttctatctgatggtcacattgtgtatcagggtcctcgtgaaaatgtgcttgagttctttgaatttacgggttttaaatgtcctgagaggaaagctattgctgactttcttcaagaggtaacatcaaagaaagaccaagctcaatactggacaagaggagatgaagcttacaggtttgtgagtgcaaaagaatttgttgaagcattcaaatcgtttcatgttggacagaaaataagagaatatctttcaacaccatttgacaagactaagagccatccagctgctttgacaacaaaaaactttggactcaacaagatggaacttttgaaagcatgcatgtcaagagagtacttaatcatgaaaagaaattcctttgtccacatctttaagattgtccaactttcggtaatggggttgattcatgggactcttttcctaagaacaaagatgcatcacaggacattagaagatggtacaatctatcttggtagtttgttcttcgcagcattgatgataatgtttaatggaatgtcagagatacctatgaccattgccaagcttccagtgttttacaaacaaagagatcttcagttcttccctgcgtgggcctatgcagttccatcaatgttgtttaaggtcccaattgcttttctagaagtagcagtgtggatcattttgacatactatacaactggattggaaccaagtgttgtaaggatgtttaggctttattttatcttagtcattgttaatcagatggcctccggactctttcgatctattgcagccctttctaggaatatgatatttgccaacacttttgggtcatttgtgttgctcttacttattgtactaggcggtttcatcttgtctaaagatgatatcaacagtggatggatttgggcttactgggtaacccctttgatgtacggtcagactggtattcttgttaatgagtttcgtggaagcaaatggaataaggtaacaccaaactcaacagaaactcttggtattcaagtgttaaaatctaaaggattctttactgattcttattggtattggcttggctttggggtgttggttgcatatactgttcttttcaacattttgtacactttggctctcaattaccttaatgcaattgaaaaatcacaagctctttctaatgaagatcctgagaataatgatcatgaaatccaagttggcagagaaacaagaaccaatgaaatacaacaaacatcatcaataaataacactggtgaaaatcagagtaaaaagaaaggaatgattcttccatttgagccacattccattacttttaatgatgttatttactcagtggacatgccacaagcaatgaagaatcaaggtgtagttgaggataaacttgttctactaaaaggggttagtggtagttttaggcctggtgtattgacagctttgatgggaatcagtggagctggtaagaccactttgatggatgtgcttgctggtagaaaaaccggtggatatatcgaaggggatattcgaatttctggttaccctaagaaacaagaaacatttgctcgaatttcgggatactgtgagcaaaacgacattcattcacctcatgttactgtttatgagtcattgctttactcagcatggcttcgtttaccaactgaagttgattcagaaaagagaaagatgttcattgaggaagtaatggagctagtggagctcactccacttagacaagccctagttggattgcctggcgtctcaggactctcaactgagcaaagaaagaggttgacaattgcggttgagttagtggcaaatccttctataatattcatggatgaaccaacttcagggctggatgccagagctgctgctattgtaatgagaacagttaggaacacagtggacactggcagaactgttgtgtgcacaattcatcaaccaagtattgacatctttgaagcctttgatgagctattccttatgaaaagaggaggagaagagatatatgtggggccattaggtagacattcttgccatttaatcaactattttgaggctattgaaggtgtgagtaaaataaaaaatggttacaatccaggaacttggatgttggaggtttcgagctcagcacaagaaatagctttgggtgttgatttcgccaacatttacaaaaattcagagctatgcaggagaaacaaagaattgattaaagaattgagcagtccagctcctggttctaaggatctttatttcccaactcaattctctcgatctttgaacactcaatgcattgcttgcttatggaaacaaagacaatcatactggcgaaacccgctttacactgctgttagattcatgtttaccactttcatagctttaatctttggtacagtgttttgggacttgggatctaaaaggtcaaatatacaagatcttagcaatgcattgggatccatgtactgtgctgttttgtttatcggtatacaaaatgcatcatccgtacaaccagtagttagcgtagaaagaagtgtgttttacagagaaaaagccgcaggaatgtactctgcttttccttattcattcggacagttggtggttgagattccatacattttgtgtcaaagtgtagtttactgtctaattgtgtatgcaatgattggttttgaatggactgctataaagttcttctggttcttgttcttctcattcttttcaatgctttacttcactttctacggcatgatggctgtgggaatcactccaaataatcacattgcttccattgtttcctctgccttttactcagtatggaaccttttctctggatttatcgttcctaggactaggataccgatatggtggaggtggtactactgggcttgtccaacagcgtggaccttgtacggactgttagtatcacagtatggagatgttgaagatgtgatggatgccgaaacaggtgaaactgtgaaacaatacttgaaaagctattttggatacaaacatgatttcattggagtcgttgccatggtcaatgtgttctatggtttgctctttggaggcatctttgccttgtctattaaggttttaaattttcagaatagatag

SEQ ID NO: 124 - protein, 1446 aa, Artificial sequence
  T-AG2575-2  synt. amino acid sequence
MEVGDLYRAGNSLRNISLRSSTSSVWRGNNNNNNNKDEYFLKSRREDDINDEEALTWAALEKLPTYDRLRKGILTTSKGETTEVDVINLGFKQRKDLLQRLVNVADEDNESFLLKLKQRIQTVGIDLPTIEVRFENVKVEADVHVGSRALPSFINFCINIIEMLVSFLPILKSKKKHVTILDDVSGAIKPGRLTLLLGPPSSGKTTLLLTLAGKLASELKFSGRVTYNGHEMNEFIPQRTAAYISQHDVHIGEMTVRETLSFSARCQGVGTRYEMLAELSRREKEANIKPDPDIDVFMKAASAEGQESSVITDYIIKILGLEGCADTMVGNEMLRGISGGQKKRVTTGEMLVGPAGALFMDEISTGLDSSTTYQIVNSLKQYVHIFNGTNVISLLQPAPETYDLFDDIILLSDGHIVYQGPRENVLEFFEFTGFKCPERKAIADFLQEVTSKKDQAQYWTRGDEAYRFVSAKEFVEAFKSFHVGQKIREYLSTPFDKTKSHPAALTTKNFGLNKMELLKACMSREYLIMKRNSFVHIFKIVQLSVMGLIHGTLFLRTKMHHRTLEDGTIYLGSLFFAALMIMFNGMSEIPMTIAKLPVFYKQRDLQFFPAWAYAVPSMLFKVPIAFLEVAVWIILTYYTTGLEPSVVRMFRLYFILVIVNQMASGLFRSIAALSRNMIFANTFGSFVLLLLIVLGGFILSKDDINSGWIWAYWVTPLMYGQTGILVNEFRGSKWNKVTPNSTETLGIQVLKSKGFFTDSYWYWLGFGVLVAYTVLFNILYTLALNYLNAIEKSQALSNEDPENNDHEIQVGRETRTNEIQQTSSINNTGENQSKKKGMILPFEPHSITFNDVIYSVDMPQAMKNQGVVEDKLVLLKGVSGSFRPGVLTALMGISGAGKTTLMDVLAGRKTGGYIEGDIRISGYPKKQETFARISGYCEQNDIHSPHVTVYESLLYSAWLRLPTEVDSEKRKMFIEEVMELVELTPLRQALVGLPGVSGLSTEQRKRLTIAVELVANPSIIFMDEPTSGLDARAAAIVMRTVRNTVDTGRTVVCTIHQPSIDIFEAFDELFLMKRGGEEIYVGPLGRHSCHLINYFEAIEGVSKIKNGYNPGTWMLEVSSSAQEIALGVDFANIYKNSELCRRNKELIKELSSPAPGSKDLYFPTQFSRSLNTQCIACLWKQRQSYWRNPLYTAVRFMFTTFIALIFGTVFWDLGSKRSNIQDLSNALGSMYCAVLFIGIQNASSVQPVVSVERSVFYREKAAGMYSAFPYSFGQLVVEIPYILCQSVVYCLIVYAMIGFEWTAIKFFWFLFFSFFSMLYFTFYGMMAVGITPNNHIASIVSSAFYSVWNLFSGFIVPRTRIPIWWRWYYWACPTAWTLYGLLVSQYGDVEDVMDAETGETVKQYLKSYFGYKHDFIGVVAMVNVFYGLLFGGIFALSIKVLNFQNR

SEQ ID NO: 125 - DNA, 4275 bp, Artificial sequence
  T_796_1 synt. nucleic acid sequence
atggatggcggggatgtctatcgtgccggcaacagcctccgaaacagtatgcgtaacggttcaacttcattgtggagaaacaataacatggaggtattctccaagtcctcaagagaagaggatgacgaggacgccttaaagtgggctgctctggagaagctccccacctacagtagattacgaaaagggattctgaccacttctaaaggagaatctaatgaggtagacatccacgaattagggtttaaagagcgtaaaaatcttctcgaacgactggttaaagtagcagaggaggacaatgaaaagttcctttttaaactcaagaacaggatcgatagagtcggtttagacgttcctaccattgaagtgaggtttgaacatgtgaacgtggaggccgagattcatgtaggcagcagggctttgccatcatttataaacttcagtatcaatatcgtcgaggggctgcttggctttctgccaatctttaacacaaaaaaaaagcacttgaacatacttcaggacgtgtcaggggttataaagcctggcagattaaccctgctgcttggtccaccatcaagcggtaagactacactgctccttacactggctggcaagctcgccagtgaattaaagttctccggccgtgttacttataacggccacgaaatgaatgagttcattcctcaacgtaccgccgcttacataagtcaacatgatgttcatatcggggagatgacagtcagggagacactgtcattttctgcaaggtgtcagggagtcggcacaaggtacgacatgttgtctgagttgagtcgacgagagcgtgaagctaacatcaagccagaccccgacgtcgatgtctatatgaaggctgcagctatcgagggccaagaaacttcagttatgaccgattacgtattaaaaatcttgggcctcgaagtttgcgccgacacaatggtgggggatgagatgttgagagggatctctggaggacagcgtaagcgagtcaccactggggagatgcttgtcgggccagctggagtactcctcatggacgagataagtactggcttagattcctcaaccacatttcaaatcgtaaattcacttaagcaatacgttcatatatttaatggaaccaacgtaatatcattgttacaaccagcacccgagacttatgatttatttgatgatatcatcttgctgagtgacggccaaatagtgtatcagggccctagggaaaacgtgctttcatttttcgaaagcatgggctttaaatgtcctgagagaaagggagtcgcagactttttgcaagaggttaccagccgtaaggatcaggcccagtattgggctagaagagagcatccttatagatatgtaaccgttaaagaatttgcagaggccttcaaatctttccacgttggacaaaggatcgatgactacttattaacaccatatgataagtctaagaaccatcccgccgctttaaccacaaaaaactacggggttagtaagaaggagtttttaaaagcctgcttctcccgagaatacttacttatgcatcgtaacagtttcgtatacatattcaaattaatacagttgacctttatggctcttgtagcaaccacattgtttttgaggactgagatgcacaggaataccgtcgatgatggcagtatctatctgggaagcttatttttcacagccgtcatgataatgtttaatggtatgagtgaattacctatgaccattgccaagttaccagtattctataaacagcgagatctccagttctacccagcatgggcttatgcacttccctcatggattcttaaaatccccataaccttcctggaagtgggcgtctgggtggccatcacttactacagtatcggcctggatcccaatgtgggccgtctctttagacagtacttggtcttgatcttcataaaccagatggctagtgccttattcagggctactgcagcaaccggccgtaacatgataatcgcaaatacttttggatcatttgtacttgttatgttagtaaccctcggcgggttcgtgcttagccgtgatgatatcaaaggctggtggatatgggggtactggatctccccccttatgtatgggcagaccgctgttttagtcaacgaatttctcggacagaaatggcgacacgtagggcctaactcaacccaaccattggggatccaggttctggagagtaggggttttttcaccaggggatattggtactggcttggcctgggggcattaatcgggtttataatcatcctcaacattctctacactctggctcttacctacctcaacccatttgaaaaaagccaatccgtaaaagctgaggacaccgaaaatgatatacaggacgggcagcagaacagcagtaatattggagagaaccaagttgctaagaagggaatgatcttgcccttcgagccccacagtattagcttcgacgacgtggtatacagcgtagacatgccacaagagatgaagaatcaaggcgtggtggacgacaaactcgtcttacttaaaggagtaagtggttcattcaggcctggggtcctcactgcattaatgggggtgtcaggcgccggtaagaccacccttatggatgttctggccggcaggaaaaccggcgggtacatagagggagatgttaggatctctggttacccaaagaaccaacaaacctttgcacgaattagtggttattgtgaacagaatgacatccatagtccccacgttaccatctacgaatcactggtttactccgcttggctgcgactccctgcagaggtggactccgaaaagcgtaaaatgttcatcgaggaggttatggaattagtcgaactgactcccttgagacaggcattagttggacttcctggtgtgaacggtctttcaaccgagcaacgaaagagactcacaatcgctgtcgagctcgtcgctaatccctcaattattttcatggacgagcctacttcagggctggatgcccgagctgccgcaatagttatgagaacagtccgtaatacagttgacacaggcaggactgtcgtctgtactatacatcaacctagtatagacatattcgaagcattcgatgagctttttcttatgaagcgtggcggggaggaaatatacgtcggccctctcgggagacactcatgtcatttagtgaactatttcgaggctattgagggtgtgtccaaaattaaggacggttacaaccccgcaacttggatgcttgaagtgagctcatcagcccaagagatcgccctcggagtagacttcaacaagatttataaatcttcagaattataccgttcaaacaagcaattgataaaagaactgtcaactccagcacctgattccaacgatttatacttccccacccaatacagcaggtctttttacactcaatgtatcgcatgtctctggaaacagagattatcctattggaggaaccccccatatactgctgttagatttatgttcactgcttttattgggcttatgtttggaaccatgttttgggacttaggcagtaaacgatcaagacagcaggatatactgaacagtatgggatcaatgtatgcagccgtgtttttcattggtgtccaaaatgccagttccgtgcaacccgtcgtcagtattgaacgtacagtgttttacagagaacgtgcagctggtatgtacagttgtttcccttacagtttcggccaagttgtagtagaaatcccttacatttttatacaagcttccgtttactgtcttattgtttatgcaatgattggcttcgagtggaccgctgccaagttcttttggtatttattttttacattcttcgcaatgctctattttaccttttatggaatgatgacagtcggtgtcacaccaaatcaccatatagcctcaatagtcagcagcgcattttatgggttatggaatattttcgcaggattcgtagtacccagaacacgtattcccatttggtggcgatggtactactggggctgtcccgtagcatggacactctatgggctggtggcttcacaatatggggacctgtcagaggacataattgcagagacaggggaatctgtcgagcaatttttaagacgtttttttgggtttagacacgacttcctcgagttcgtcgcccttgcaaatgtggccttcgcagtattattcgctatcatttttgctttttctattaaactgtttaacttccagagccgataa

SEQ ID NO: 126 - protein, 1424 aa, Artificial sequence
  T_796_1 synt. amino acid sequence
MDGGDVYRAGNSLRNSMRNGSTSLWRNNNMEVFSKSSREEDDEDALKWAALEKLPTYSRLRKGILTTSKGESNEVDIHELGFKERKNLLERLVKVAEEDNEKFLFKLKNRIDRVGLDVPTIEVRFEHVNVEAEIHVGSRALPSFINFSINIVEGLLGFLPIFNTKKKHLNILQDVSGVIKPGRLTLLLGPPSSGKTTLLLTLAGKLASELKFSGRVTYNGHEMNEFIPQRTAAYISQHDVHIGEMTVRETLSFSARCQGVGTRYDMLSELSRREREANIKPDPDVDVYMKAAAIEGQETSVMTDYVLKILGLEVCADTMVGDEMLRGISGGQRKRVTTGEMLVGPAGVLLMDEISTGLDSSTTFQIVNSLKQYVHIFNGTNVISLLQPAPETYDLFDDIILLSDGQIVYQGPRENVLSFFESMGFKCPERKGVADFLQEVTSRKDQAQYWARREHPYRYVTVKEFAEAFKSFHVGQRIDDYLLTPYDKSKNHPAALTTKNYGVSKKEFLKACFSREYLLMHRNSFVYIFKLIQLTFMALVATTLFLRTEMHRNTVDDGSIYLGSLFFTAVMIMFNGMSELPMTIAKLPVFYKQRDLQFYPAWAYALPSWILKIPITFLEVGVWVAITYYSIGLDPNVGRLFRQYLVLIFINQMASALFRATAATGRNMIIANTFGSFVLVMLVTLGGFVLSRDDIKGWWIWGYWISPLMYGQTAVLVNEFLGQKWRHVGPNSTQPLGIQVLESRGFFTRGYWYWLGLGALIGFIIILNILYTLALTYLNPFEKSQSVKAEDTENDIQDGQQNSSNIGENQVAKKGMILPFEPHSISFDDVVYSVDMPQEMKNQGVVDDKLVLLKGVSGSFRPGVLTALMGVSGAGKTTLMDVLAGRKTGGYIEGDVRISGYPKNQQTFARISGYCEQNDIHSPHVTIYESLVYSAWLRLPAEVDSEKRKMFIEEVMELVELTPLRQALVGLPGVNGLSTEQRKRLTIAVELVANPSIIFMDEPTSGLDARAAAIVMRTVRNTVDTGRTVVCTIHQPSIDIFEAFDELFLMKRGGEEIYVGPLGRHSCHLVNYFEAIEGVSKIKDGYNPATWMLEVSSSAQEIALGVDFNKIYKSSELYRSNKQLIKELSTPAPDSNDLYFPTQYSRSFYTQCIACLWKQRLSYWRNPPYTAVRFMFTAFIGLMFGTMFWDLGSKRSRQQDILNSMGSMYAAVFFIGVQNASSVQPVVSIERTVFYRERAAGMYSCFPYSFGQVVVEIPYIFIQASVYCLIVYAMIGFEWTAAKFFWYLFFTFFAMLYFTFYGMMTVGVTPNHHIASIVSSAFYGLWNIFAGFVVPRTRIPIWWRWYYWGCPVAWTLYGLVASQYGDLSEDIIAETGESVEQFLRRFFGFRHDFLEFVALANVAFAVLFAIIFAFSIKLFNFQSR

SEQ ID NO: 127 - DNA, 1968 bp, Artificial sequence
  BCRP human nucleic acid sequence
atgagctctagcaacgtagaggtttttatacccgtatcacagggtaataccaatggtttcccggctacagctagtaacgatctcaaggcattcacggagggcgctgtccttagttttcataatatctgctacagagttaagctgaagtctggttttttaccttgccgaaagccggtcgagaaagagatactttctaacattaacgggatcatgaagcctggtcttaatgcaatacttggacccactggagggggtaagagtagtctgttggatgttctggcagctcgtaaagacccaagtgggctctctggggacgtacttattaatggtgctccacgtccagctaacttcaaatgcaactctggctacgtcgtgcaagatgacgttgtcatggggaccctcacagtaagagaaaatttgcaatttagtgccgccctcaggctcgcaactactatgacgaaccatgaaaaaaatgagcgtataaacagagtcatccaagagcttgggcttgacaaggtcgcagatagcaaggtaggcacccagttcattcgaggagtttctgggggagagagaaaacgaacctccatcggtatggaattaataacagacccaagtatactgtttcttgatgaacctaccactgggcttgactcatctactgctaatgccgttcttcttttgcttaaacgaatgtctaagcaaggcaggacgatcatcttttcaatacaccaaccccgatatagcatcttcaaactgttcgattctctgaccctcttggcatccggcaggttgatgtttcacggaccagcacaagaagccctcgggtattttgagagtgctgggtatcactgtgaagcttataataatccggcagatttttttctggatatcatcaacggagattccaccgctgttgcccttaatagggaggaagattttaaggcaactgaaataattgaaccttccaagcaagataagcccttaatagagaaactggccgaaatttatgtaaattcttctttttacaaagaaacaaaggccgaactgcaccaactctctggaggtgagaagaagaagaagattaccgtgttcaaagaaatttcttacactacttccttctgtcatcaactgagatgggtgtcaaagcgttcttttaagaacttactgggaaacccgcaagctagcatcgctcaaatcattgttaccgtggtcttaggacttgttattggcgccatctattttgggcttaaaaatgatagcaccgggattcagaatagggctggcgttctctttttcctcacgacaaaccagtgtttcagcagcgtatctgctgtagagctctttgtggtagagaagaaattatttatccacgagtatatttcaggctactaccgtgtatcctcatactttttggggaaactcctgtccgacctgctccccatgactatgttgccttctattatttttacttgtatagtctacttcatgctgggactcaaaccgaaggctgacgcattctttgtaatgatgttcacccttatgatggttgcttacagtgcatccagtatggccttggcaattgctgctggccagtcagttgtaagcgttgctacactcttgatgacaatatgcttcgtgttcatgatgatcttttcagggttgcttgtgaacttgaccactatcgctagctggctctcatggttgcagtatttcagcataccacgatatggctttacagccctccagcataatgagttcttagggcagaatttctgccccggactcaatgcaacggggaataacccatgcaactacgcaacatgcaccggggaggaatacctcgtcaaacaaggaatagatctgagcccctggggcctttggaagaatcatgtagcccttgcttgtatgatagtgatattccttacgattgcctacttgaaacttctgttccttaagaagtactcataa

SEQ ID NO: 128 - protein, 655 aa, Artificial sequence [sequence omitted]

SEQ ID NO: 129 - DNA, 3843 bp, Artificial sequence
  G-gp1 human nucleic acid sequence
atggacctagagggtgatagaaatggtggtgccaaaaagaaaaatttctttaagcttaataataaatccgagaaggataaaaaggagaagaaaccaactgtcagtgtattttctatgttccgttacagcaattggctcgacaagctctatatggtcgtggggacacttgccgccattattcatggtgccgggttaccactgatgatgctggtttttggggaaatgaccgatatatttgctaatgcaggaaacctagaagatctaatgtcaaacatcaccaaccgatcagacattaacgatacaggcttcttcatgaaccttgaagaggacatgactcgatatgcttactattatagcggaattggtgcaggtgtgctagttgccgcttatattcaagttagcttctggtgcttagccgccggtagacagatacacaagatacgaaagcaattctttcatgcaataatgaggcaggaaattgggtggttcgacgtacacgatgtcggggagctgaacacaagactgactgacgacgtatccaaaattaacgagggtatcggcgacaaaattggcatgtttttccaaagcatggccactttttttaccggtttcatcgttgggtttacacgtgggtggaaactcactttagtaattctcgccataagtcccgtgttgggactatctgccgctgtctgggcaaagattcttagcagctttactgacaaggagttgctcgcttacgcaaaagccggtgctgtggctgaagaggttctggccgctatccgtacagtaatagccttcggtggtcagaaaaaggagttggaaagatacaacaagaatttagaagaggctaagcgtatcggtatcaaaaaagctattactgccaatatttcaatcggggctgcatttttattgatatatgcctcttatgctctcgctttctggtatggcactacccttgtgctctctggagagtatagtatagggcaggttttaactgttttcttctctgttctgataggagcattttcagtcgggcaagcatctccatcaatagaagcttttgcaaatgctcgtggcgctgcctatgaaattttcaaaataatagacaataagccaagcatagactcatactctaaatcaggacacaagccagataatataaagggaaaccttgagttccgtaatgttcacttttcttatcctagtagaaaggaggtaaaaatcctaaaagggctgaatctcaaagttcaatctggccagacagttgcattagtcggaaactcaggttgtggtaaaagcactactgtgcagttaatgcagcgattatacgaccccactgagggtatggtgtccgtagatggtcaggacatacgtacaatcaatgttcgatttctgagggagataatcggcgtagtttcacaagagcctgttctattcgccacaactatagctgagaacataaggtacggacgtgagaacgttacaatggacgagattgagaaagcagtcaaggaggcaaatgcctacgatttcattatgaagcttccccataagttcgatactttagttggagaacgaggtgctcagctttccggtggccagaagcagaggattgcaattgcaagagccttggtgaggaaccccaaaatattactacttgacgaagccacatccgcactagatactgagagtgaggcagtggtgcaagttgcattggataaggccaggaagggccgaaccactatcgtcattgcccacaggctgtccaccgtacgtaacgccgacgttattgcagggttcgatgatggggttattgttgagaagggaaatcatgatgagctcatgaaagaaaaggggatatatttcaagctcgtgaccatgcaaaccgccggaaatgaagtcgagctagagaacgctgcagatgagtccaagagtgaaatagacgcactagagatgagctccaacgattccagatccagtctcatccgtaaacgatcaactagacgatccgtgcgtgggtcacaggctcaggacagaaaactttccaccaaagaagcattggacgagtcaattccccccgtaagcttctggagaataatgaaactcaatctcacagagtggccatacttcgtagtcggcgtattttgcgccatcatcaatggcgggcttcaacccgcattcgccatcatttttagtaaaataattggggtatttaccagaatagacgacccagagactaagaggcaaaactccaacctattctcactattattcctggccttgggcattatctcatttataacttttttcttacaggggtttacatttgggaaggccggggagattctaacaaagcgtctacgttatatggttttcagatctatgctaaggcaagatgtaagttggtttgatgaccctaagaacaccaccggagcactgacaacccgattggccaatgacgctgctcaggttaagggggctatcggttcccgtctcgccgttattacacaaaatatagctaacttggggacaggaatcataatatcattcatctacggatggcaattaacacttctacttctggctattgttcccataatagccattgctggcgtcgtcgagatgaaaatgttaagcggtcaggcattgaaagataagaaagaactagagggctctgggaagatcgccactgaagcaattgagaatttcagaactgtagtaagtctaacacaggaacaaaaatttgaacacatgtatgcacagagccttcaggtgccatatcgaaattccctgcgaaaggcacacattttcggaattacattctccttcactcaggccatgatgtatttttcttatgcaggttgcttcagatttggcgcatatctcgttgcccataaactcatgtcctttgaggacgtattattagttttctccgccgtagtatttggggctatggcagtaggtcaagtctcatcctttgcacctgattatgccaaggccaaaatttcagctgcacatataataatgatcatagaaaaaactcccctgattgactcatacagtactgagggcctgatgcctaacactttggagggtaacgttacatttggcgaagtcgttttcaactacccaacccgacctgacatacctgttttacaaggattgtctctcgaagtgaaaaaaggccagacactcgccttagtgggctcatctggctgtggaaagagcacagttgttcaactcttggaacgattttatgaccccctagctggcaaggtcttgcttgatggcaaagagattaagcgacttaatgttcaatggttaagagcacacctcggaattgtcagccaggagccaatcctatttgactgcagtatcgccgagaatatagcttatggagataattccagggtagtaagccaggaagagattgtaagggctgcaaaggaagcaaacatccacgcttttattgaaagcctacctaacaaatatagtactaaagttggcgataagggcacacagctctcagggggtcagaaacaaaggattgccattgctcgagccctagtgcgtcagccccacatcttacttttagacgaagccactagcgcactcgacacagagagcgagaaggtagtgcaggaagctttggataaagctagggagggtcgtacatgcattgtgattgctcatagactaagtactattcaaaacgcagacctaatagtagtgttccagaatggcagggtgaaagagcatggtactcatcagcaactgctagcacagaagggcatatatttcagcatggtgtccgtgcaagcagggacaaaacgtcagtga

SEQ ID NO: 130 - protein, 1280 aa, Artificial sequence
  G-gp1 human  amino acid sequence
MDLEGDRNGGAKKKNFFKLNNKSEKDKKEKKPTVSVFSMFRYSNWLDKLYMVVGTLAAIIHGAGLPLMMLVFGEMTDIFANAGNLEDLMSNITNRSDINDTGFFMNLEEDMTRYAYYYSGIGAGVLVAAYIQVSFWCLAAGRQIHKIRKQFFHAIMRQEIGWFDVHDVGELNTRLTDDVSKINEGIGDKIGMFFQSMATFFTGFIVGFTRGWKLTLVILAISPVLGLSAAVWAKILSSFTDKELLAYAKAGAVAEEVLAAIRTVIAFGGQKKELERYNKNLEEAKRIGIKKAITANISIGAAFLLIYASYALAFWYGTTLVLSGEYSIGQVLTVFFSVLIGAFSVGQASPSIEAFANARGAAYEIFKIIDNKPSIDSYSKSGHKPDNIKGNLEFRNVHFSYPSRKEVKILKGLNLKVQSGQTVALVGNSGCGKSTTVQLMQRLYDPTEGMVSVDGQDIRTINVRFLREIIGVVSQEPVLFATTIAENIRYGRENVTMDEIEKAVKEANAYDFIMKLPHKFDTLVGERGAQLSGGQKQRIAIARALVRNPKILLLDEATSALDTESEAVVQVALDKARKGRTTIVIAHRLSTVRNADVIAGFDDGVIVEKGNHDELMKEKGIYFKLVTMQTAGNEVELENAADESKSEIDALEMSSNDSRSSLIRKRSTRRSVRGSQAQDRKLSTKEALDESIPPVSFWRIMKLNLTEWPYFVVGVFCAIINGGLQPAFAIIFSKIIGVFTRIDDPETKRQNSNLFSLLFLALGIISFITFFLQGFTFGKAGEILTKRLRYMVFRSMLRQDVSWFDDPKNTTGALTTRLANDAAQVKGAIGSRLAVITQNIANLGTGIIISFIYGWQLTLLLLAIVPIIAIAGVVEMKMLSGQALKDKKELEGSGKIATEAIENFRTVVSLTQEQKFEHMYAQSLQVPYRNSLRKAHIFGITFSFTQAMMYFSYAGCFRFGAYLVAHKLMSFEDVLLVFSAVVFGAMAVGQVSSFAPDYAKAKISAAHIIMIIEKTPLIDSYSTEGLMPNTLEGNVTFGEVVFNYPTRPDIPVLQGLSLEVKKGQTLALVGSSGCGKSTVVQLLERFYDPLAGKVLLDGKEIKRLNVQWLRAHLGIVSQEPILFDCSIAENIAYGDNSRVVSQEEIVRAAKEANIHAFIESLPNKYSTKVGDKGTQLSGGQKQRIAIARALVRQPHILLLDEATSALDTESEKVVQEALDKAREGRTCIVIAHRLSTIQNADLIVVFQNGRVKEHGTHQQLLAQKGIYFSMVSVQAGTKRQ

1. A plant comprising a genome having an introgression which comprises a polynucleotide sequence encoding a polypeptide having a terpene synthase activity, said polypeptide comprising an amino acid sequence selected from the group consisting of SEQ ID NO: 1-45, said introgression comprising allelic variation(s) as compared to a genome of a recurrent parent of the plant.

2. A method of producing a plant having a terpene synthase activity of interest, the method comprising:
(a) crossing a plant which comprises a polynucleotide sequence encoding a polypeptide having a terpene synthase activity, said polypeptide comprising an amino acid sequence selected from the group consisting of SEQ ID NO: 1-45 with a plant of interest, said plant of interest being a recurrent parent; and
(b) selecting from a progeny of said crossing a plant having said terpene synthase activity of interest.

3. (canceled)

4. A method of producing a plant having a terpene profile of interest, the method comprising:
(a) crossing the plant of claim 1, with a plant of interest; and
(b) selecting from a progeny of said crossing a plant having said terpene profile of interest.

5. An organism comprising a genome having been genetically modified to express a polypeptide having a terpene synthase activity, said polypeptide being at least 95% identical to an amino acid sequence selected from the group consisting of SEQ ID NO: 1-45.

6. (canceled)

7. A method of modulating terpene synthesis in an organism, the method comprising over-expressing within at least one cell of the organism a polypeptide having a terpene synthase activity, said polypeptide being at least 95% identical to an amino acid sequence selected from the group consisting of SEQ ID NO: 1-45, thereby modulating terpene synthesis in the organism.

8. An isolated polypeptide comprising an amino acid sequence at least 95% identical to the amino acid sequence selected from the group consisting of SEQ ID NOs: 1-45, wherein the polypeptide, when expressed in an organism, is capable of modulating the synthesis of a terpene of interest.

9. A plant comprising a genome having an introgression which comprises a polynucleotide sequence encoding a polypeptide having a transporter activity, said polypeptide comprising an amino acid sequence selected from the group consisting of SEQ ID NO: 46-57, 116, 118, 120, 122, 124, 126, 128 and 130, said introgression comprising allelic variation(s) as compared to a genome of a recurrent parent of the plant.

10. (canceled)

11. (canceled)

12. A method of producing a plant having a transporter activity of interest, the method comprising:
(a) crossing the plant of claim 9, with a plant of interest; and
(b) selecting from a progeny of said crossing a plant having said transporter activity of interest.

13. (canceled)

14. (canceled)

15. (canceled)

16. An organism comprising a genome having been genetically modified to express a polypeptide having a transporter activity, said polypeptide being at least 95% identical to an amino acid sequence selected from the group consisting of SEQ ID NO: 46-57, 116, 118, 120, 122, 124, 126, 128 and 130.

17. (canceled)

18. A method of modulating transport of metabolites in an organism, the method comprising over-expressing within at least one cell of the organism a polypeptide having a transporter activity, said polypeptide being at least 95% identical to an amino acid sequence selected from the group consisting of SEQ ID NO: 46-57, 116, 118, 120, 122, 124, 126, 128 and 130, thereby modulating the transport of the metabolites in the organism.

19. (canceled)

20. (canceled)

21. (canceled)

22. An isolated polypeptide comprising an amino acid sequence at least 95% identical to the amino acid sequence selected from the group consisting of SEQ ID NOs: 46-57, 116, 118, 120, 122, 124, 126, 128 and 130, wherein the polypeptide, when expressed in an organism, is capable of modulating transport of metabolites.

23. (canceled)

24. (canceled)

25. An isolated polynucleotide encoding a polypeptide having a terpene synthase activity, said polypeptide being at least 95% identical to an amino acid sequence selected from the group consisting of SEQ ID NO: 1-45.

26. An isolated polynucleotide encoding a polypeptide having a transporter activity, said polypeptide being at least 95% identical to an amino acid sequence selected from the group consisting of SEQ ID NO: 46-57, 116, 118, 120, 122, 124, 126, 128 and 130.

27. A nucleic acid construct comprising a nucleic acid sequence of the polynucleotide of claim 25, and a cis-acting regulatory element for directing expression of said nucleic acid sequence in a cell.

28. (canceled)

29. (canceled)

30. (canceled)

31. An isolated cell comprising at least one exogenous polynucleotide according to claim 25.

32. A genetically modified organism comprising at least one exogenous polynucleotide according to claim 25.

33. A plant generated according to the method of claim 2.

34. An organism generated according to the method of claim 7.

35. A method of producing a terpene of interest, the method comprising recovering a terpene fraction comprising the terpene of interest from the plant of claim 1.

36. A terpene containing fraction of the plant of claim 1.

37. (canceled)

38. (canceled)

39. (canceled)

40. A seed of the plant of claim 1.

41. (canceled)

42. A method of producing a plant comprising sowing the seed of claim 40 under conditions which allow growth of the plant.

43. (canceled)

44. (canceled)

45. (canceled)

46. (canceled)

47. (canceled)

48. A pharmaceutical or cosmetic composition, or food or processed product, obtainable from the plant of claim 1.

49. (canceled)

50. (canceled)
